(19) United States
(12) Patent Application Publication
(10) Pub. No.: US 2009/0148905 A1
(43) Pub. Date: Jun. 11, 2009

(54) ANTIGEN-BINDING CONSTRUCTS

(76) Inventors: Claire ASHMAN, Stevenage (GB); Thil Batuwangala, Cambridge (GB); Michael Neil Burden, Stevenage (GB); Stephanie Jane Clegg, Stevenage (GB); Rudolf Maria De Wildt, Cambridge (GB); Jonathan Henry Ellis, Stevenage (GB); Paul Andrew Hamblin, Stevenage (GB); Farhana Hussain, Stevenage (GB); Laurent Jespers, Cambridge (GB); Alan Lewis, Stevenage (GB); Martin Anibal Orecchia, Stevenage (GB); Radha Shah, Stevenage (GB); Michael Steward, Stevenage (GB)

Correspondence Address: SMITHKLINE BEECHAM CORPORATION;CORPORATE INTELLECTUAL PROPERTY-US, UW2220, P. O. BOX 1539, KING OF PRUSSIA, PA, 19406-0939, US

(21) Appl. No.: 12/324,905

(22) Filed: Nov. 28, 2008

Related U.S. Application Data
(60) Provisional application No. 60/991,449, filed on Nov. 30, 2007.
(60) Provisional application No. 61/027,858, filed on Feb. 12, 2008.
(60) Provisional application No. 61/046,572, filed on Apr. 21, 2008.
(60) Provisional application No. 61/081,191, filed on Jul. 16, 2008.
(60) Provisional application No. 61/084,431, filed on Jul. 29, 2008.

(51) Int. Cl. C12P 21/02; C07K 16/00; C07H 21/00; A61K 39/395; C12N 5/10

(52) U.S. Cl. 435/69.6; 530/387.3; 536/23.53; 435/326; 424/133.1

(57) ABSTRACT

The invention relates to antigen-binding constructs comprising a protein scaffold which are linked to one or more epitope-binding domains wherein the antigen-binding construct has at least two antigen binding sites at least one of which is from an epitope binding domain and at least one of which is from a paired VH/VL domain, methods of making such constructs and uses thereof.

### CROSS REFERENCE TO PRIOR APPLICATIONS

[0001] This application claims the benefit of U.S. provisional applications 60/991,449, filed 30 Nov. 2007, 61/027,858, filed 12 Feb. 2008, 61/046,572, filed 21 Apr. 2008, 61/081,191, filed 16 Jul. 2008, and 61/084,431 filed 29 Jul. 2008 incorporated by reference in its entirety.

### BACKGROUND

[0002] Antibodies are well known for use in therapeutic applications. Antibodies are heteromultimeric glycoproteins comprising at least two heavy and two light chains. Aside from IgM, intact antibodies are usually heterotetrameric glycoproteins of approximately 150 Kda, composed of two identical light (L) chains and two identical heavy (H) chains. Typically, each light chain is linked to a heavy chain by one covalent disulfide bond while the number of disulfide linkages between the heavy chains of different immunoglobulin isotypes varies. Each heavy and light chain also has intrachain disulfide bridges. Each heavy chain has at one end a variable domain (VH) followed by a number of constant regions. Each light chain has a variable domain (VL) and a constant region at its other end; the constant region of the light chain is aligned with the first constant region of the heavy chain and the light chain variable domain is aligned with the variable domain of the heavy chain. The light chains of antibodies from most vertebrate species can be assigned to one of two types called Kappa and Lambda based on the amino acid sequence of the constant region. Depending on the amino acid sequence of the constant region of their heavy chains, human antibodies can be assigned to five different classes, IgA, IgD, IgE, IgG and IgM. IgG and IgA can be further subdivided into subclasses, IgG1, IgG2, IgG3 and IgG4; and IgA1 and IgA2. Species variants exist with mouse and rat having at least IgG2a, IgG2b. The variable domain of the antibody confers binding specificity upon the antibody with certain regions displaying particular variability called complementarity determining regions (CDRs). The more conserved portions of the variable region are called Framework regions (FR). The variable domains of intact heavy and light chains each comprise four FR connected by three CDRs. The CDRs in each chain are held together in close proximity by the FR regions and with the CDRs from the other chain contribute to the formation of the antigen binding site of antibodies. The constant regions are not directly involved in the binding of the antibody to the antigen but exhibit various effector functions such as participation in antibody dependent cell-mediated cytotoxicity (ADCC), phagocytosis via binding to Fcγ receptor, half-life/clearance rate via neonatal Fc receptor (FcRn) and complement dependent cytotoxicity via the C1q component of the complement cascade.

[0003] The nature of the structure of an IgG antibody is such that there are two antigen-binding sites, both of which are specific for the same epitope. They are therefore, monospecific.

[0004] A bispecific antibody is an antibody having binding specificities for at least two different epitopes. Methods of making such antibodies are known in the art. Traditionally, the recombinant production of bispecific antibodies is based on the coexpression of two immunoglobulin H chain-L chain pairs, where the two H chains have different binding specificities see Millstein et al, Nature 305 537-539 (1983), WO93/08829 and Traunecker et al EMBO, 10, 1991, 3655-3659. Because of the random assortment of H and L chains, a potential mixture of ten different antibody structures are produced of which only one has the desired binding specificity. An alternative approach involves fusing the variable domains with the desired binding specificities to heavy chain constant region comprising at least part of the hinge region, CH2 and CH3 regions. It is preferred to have the CH1 region containing the site necessary for light chain binding present in at least one of the fusions. DNA encoding these fusions, and if desired the L chain are inserted into separate expression vectors and are then cotransfected into a suitable host organism. It is possible though to insert the coding sequences for two or all three chains into one expression vector. In one approach, a bispecific antibody is composed of a H chain with a first binding specificity in one arm and a H-L chain pair, providing a second binding specificity in the other arm, see WO94/04690. Also see Suresh et al Methods in Enzymology 121, 210, 1986. Other approaches include antibody molecules which comprise single domain binding sites which is set out in WO2007/095338.

### SUMMARY OF INVENTION

[0005] The present invention relates to an antigen-binding construct comprising a protein scaffold which is linked to one or more epitope-binding domains wherein the antigen-binding construct has at least two antigen binding sites at least one of which is from an epitope binding domain and at least one of which is from a paired VH/VL domain.

[0006] The invention further relates to antigen-binding constructs comprising at least one homodimer comprising two or more structures of formula I:

[chemical structure]

wherein
X represents a constant antibody region comprising constant heavy domain 2 and constant heavy domain 3;
R¹, R⁴, R⁷ and R³ represent a domain independently selected from an epitope-binding domain;
R² represents a domain selected from the group consisting of constant heavy chain 1, and an epitope-binding domain;
R³ represents a domain selected from the group consisting of a paired VH and an epitope-binding domain;
R⁵ represents a domain selected from the group consisting of constant light chain, and an epitope-binding domain;
R⁶ represents a domain selected from the group consisting of a paired VL and an epitope-binding domain;
n represents an integer independently selected from: 0, 1, 2, 3 and 4;
m represents an integer independently selected from: 0 and 1,
wherein the Constant Heavy chain 1 and the Constant Light chain domains are associated;
wherein at least one epitope binding domain is present;
and when R³ represents a paired VH domain, R⁶ represents a paired VL domain, so that the two domains are together capable of binding antigen.

[0007] The invention relates to IgG based structures which comprise monoclonal antibodies, or fragments linked to one or more domain antibodies, and to methods of making such constructs and uses thereof, particularly uses in therapy.

[0008] The invention also provides a polynucleotide sequence encoding a heavy chain of any of the antigen binding constructs described herein, and a polynucleotide encoding a light chain of any of the antigen binding constructs described herein. Such polynucleotides represent the coding sequence which corresponds to the equivalent polypeptide sequences, however it will be understood that such polynucleotide sequences could be cloned into an expression vector along with a start codon, an appropriate signal sequence and a stop codon.

[0009] The invention also provides a recombinant transformed or transfected host cell comprising one or more polynucleotides encoding a heavy chain and a light chain of any of the antigen binding constructs described herein.

[0010] The invention further provides a method for the production of any of the antigen binding constructs described herein which method comprises the step of culturing a host cell comprising a first and second vector, said first vector comprising a polynucleotide encoding a heavy chain of any of the antigen binding constructs described herein and said second vector comprising a polynucleotide encoding a light chain of any of the antigen binding constructs described herein, in a serum-free culture media.

[0011] The invention further provides a pharmaceutical composition comprising an antigen binding construct as described herein a pharmaceutically acceptable carrier.

[0012] The invention also provides a domain antibody comprising or consisting of the polypeptide sequence set out in SEQ ID NO: 2 or SEQ ID NO: 3. In one aspect the invention provides a protein which is expressed from the polynucleotide sequence set out in SEQ ID NO: 60 or SEQ ID NO: 61.

### DEFINITIONS

[0013] The term ‘Protein Scaffold’ as used herein includes but is not limited to an immunoglobulin (Ig) scaffold, for example an IgG scaffold, which may be a four chain or two chain antibody, or which may comprise only the Fc region of an antibody, or which may comprise one or more constant regions from an antibody, which constant regions may be of human or primate origin, or which may be an artificial chimera of human and primate constant regions. Such protein scaffolds may comprise antigen-binding sites in addition to the one or more constant regions, for example where the protein scaffold comprises a full IgG. Such protein scaffolds will be capable of being linked to other protein domains, for example protein domains which have antigen-binding sites, for example epitope-binding domains or ScFv domains.

[0014] A “domain” is a folded protein structure which has tertiary structure independent of the rest of the protein. Generally, domains are responsible for discrete functional properties of proteins and in many cases may be added, removed or transferred to other proteins without loss of function of the remainder of the protein and/or of the domain. A “single antibody variable domain” is a folded polypeptide domain comprising sequences characteristic of antibody variable domains. It therefore includes complete antibody variable domains and modified variable domains, for example, in which one or more loops have been replaced by sequences which are not characteristic of antibody variable domains, or antibody variable domains which have been truncated or comprise N- or C-terminal extensions, as well as folded fragments of variable domains which retain at least the binding activity and specificity of the full-length domain.

[0015] The phrase “immunoglobulin single variable domain” refers to an antibody variable domain (V_{H}, V_{HH}, V_{L}) that specifically binds an antigen or epitope independently of a different V region or domain. An immunoglobulin single variable domain can be present in a format (e.g., homo- or hetero-multimer) with other, different variable regions or variable domains where the other regions or domains are not required for antigen binding by the single immunoglobulin variable domain (i.e., where the immunoglobulin single variable domain binds antigen independently of the additional variable domains). A “domain antibody” or “dAb” is the same as an “immunoglobulin single variable domain” which is capable of binding to an antigen as the term is used herein. An immunoglobulin single variable domain may be a human antibody variable domain, but also includes single antibody variable domains from other species such as rodent (for example, as disclosed in WO 00/29004), nurse shark and Camelid V_{HH} dAbs. Camelid V_{HH} are immunoglobulin single variable domain polypeptides that are derived from species including camel, llama, alpaca, dromedary, and guanaco, which produce heavy chain antibodies naturally devoid of light chains. Such V_{HH} domains may be humanised according to standard techniques available in the art, and such domains are still considered to be “domain antibodies” according to the invention. As used herein “V_{H} includes camelid V_{HH} domains. NARV are another type of immunoglobulin single variable domain which were identified in cartilaginous fish including the nurse shark. These domains are also known as Novel Antigen Receptor variable region (commonly abbreviated to V(NAR) or NARV). For further details see Mol. Immunol. 44, 656-665 (2006) and US20050043519A.

[0016] The term “Epitope-binding domain” refers to a domain that specifically binds an antigen or epitope independently of a different V region or domain, this may be a domain antibody (dAb), for example a human, camelid or shark immunoglobulin single variable domain or it may be a domain which is a derivative of a scaffold selected from the group consisting of CTLA-4 (Evibody); lipocalin; Protein A derived molecules such as Z-domain of Protein A (Affibody, SpA), A-domain (Avimer/Maxibody); Heat shock proteins such as GroEI and GroES; transferrin (trans-body); ankyrin repeat protein (DARPin); peptide aptamer; C-type lectin domain (Tetranectin); human γ-crystallin and human ubiquitin (affilins); PDZ domains; scorpion toxinkunitz type domains of human protease inhibitors; and fibronectin (adnectin); which has been subjected to protein engineering in order to obtain binding to a ligand other than the natural ligand.

[0017] CTLA-4 (Cytotoxic T Lymphocyte-associated Antigen 4) is a CD28-family receptor expressed on mainly CD4+ T-cells. Its extracellular domain has a variable domain-like Ig fold. Loops corresponding to CDRs of antibodies can be substituted with heterologous sequence to confer different binding properties. CTLA-4 molecules engineered to have different binding specificities are also known as Evibodies. For further details see Journal of Immunological Methods 248 (1-2), 31-45 (2001)

[0018] Lipocalins are a family of extracellular proteins which transport small hydrophobic molecules such as steroids, bilins, retinoids and lipids. They have a rigid β-sheet secondary structure with a numer of loops at the open end of the conical structure which can be engineered to bind to different target antigens. Anticalins are between 160-180 amino acids in size, and are derived from lipocalins. For further details see Biochim Biophys Acta 1482: 337-350 (2000), U.S. Pat. No. 7,250,297B1 and US20070224633

[0019] An affibody is a scaffold derived from Protein A of Staphylococcus aureus which can be engineered to bind to antigen. The domain consists of a three-helical bundle of approximately 58 amino acids. Libraries have been generated by randomisation of surface residues. For further details see Protein Eng. Des. Sel. 17, 455-462 (2004) and EP1641818A1

[0020] Avimers are multidomain proteins derived from the A-domain scaffold family. The native domains of approximately 35 amino acids adopt a defined disulphide bonded structure.

[0021] Diversity is generated by shuffling of the natural variation exhibited by the family of A-domains. For further details see Nature Biotechnology 23(12), 1556-1561 (2005) and Expert Opinion on Investigational Drugs 16(6), 909-917 (June 2007)

[0022] A transferrin is a monomeric serum transport glycoprotein. Transferrins can be engineered to bind different target antigens by insertion of peptide sequences in a permissive surface loop. Examples of engineered transferrin scaffolds include the Trans-body. For further details see J. Biol. Chem. 274, 24066-24073 (1999).

[0023] Designed Ankyrin Repeat Proteins (DARPins) are derived from Ankyrin which is a family of proteins that mediate attachment of integral membrane proteins to the cytoskeleton. A single ankyrin repeat is a 33 residue motif consisting of two α-helices and a β-turn. They can be engineered to bind different target antigens by randomising residues in the first α-helix and a β-turn of each repeat. Their binding interface can be increased by increasing the number of modules (a method of affinity maturation). For further details see J. Mol. Biol. 332, 489-503 (2003), PNAS100(4), 1700-1705 (2003) and J. Mol. Biol. 369, 1015-1028 (2007) and US20040132028A1.

[0024] Fibronectin is a scaffold which can be engineered to bind to antigen. Adnectins consists of a backbone of the natural amino acid sequence of the 10th domain of the 15 repeating units of human fibronectin type III (FN3). Three loops at one end of the β-sandwich can be engineered to enable an Adnectin to specifically recognize a therapeutic target of interest. For further details see Protein Eng. Des. Sel. 18, 435-444 (2005), US20080139791, WO2005056764 and U.S. Pat. No. 6,818,418B1.

[0025] Peptide aptamers are combinatorial recognition molecules that consist of a constant scaffold protein, typically thioredoxin (TrxA) which contains a constrained variable peptide loop inserted at the active site. For further details see Expert Opin. Biol. Ther. 5, 783-797 (2005).

[0026] Microbodies are derived from naturally occurring microproteins of 25-50 amino acids in length which contain 3-4 cysteine bridges—examples of microproteins include KalataB1 and conotoxin and knottins. The microproteins have a loop which can be engineered to include up to 25 amino acids without affecting the overall fold of the microprotein. For further details of engineered knottin domains, see WO2008098796.

[0027] Other epitope binding domains include proteins which have been used as a scaffold to engineer different target antigen binding properties include human γ-crystallin and human ubiquitin (affilins), kunitz type domains of human protease inhibitors, PDZ-domains of the Ras-binding protein AF-6, scorpion toxins (charybdotoxin), C-type lectin domain (tetranectins) are reviewed in Chapter 7-Non-Antibody Scaffolds from Handbook of Therapeutic Antibodies (2007, edited by Stefan Dubel) and Protein Science 15:14-27 (2006). Epitope binding domains of the present invention could be derived from any of these alternative protein domains.

[0028] As used herein, the terms “paired VH domain”, “paired VL domain”, and “paired VH/VL domains” refer to antibody variable domains which specifically bind antigen only when paired with their partner variable domain. There is always one VH and one VL in any pairing, and the term “paired VH domain” refers to the VH partner, the term “paired VL domain” refers to the VL partner, and the term “paired VH/VL domains” refers to the two domains together.

[0029] In one embodiment of the invention the antigen binding site binds to antigen with a Kd of at least 1 mM, for example a Kd of 10 nM, 1 nM, 500 pM, 200 pM, 100 pM, to each antigen as measured by Biacore™, such as the Biacore™ method as described in method 4 or 5.

[0030] As used herein, the term “antigen binding site” refers to a site on a construct which is capable of specifically binding to antigen, this may be a single domain, for example an epitope-binding domain, or it may be paired VH/VL domains as can be found on a standard antibody. In some aspects of the invention single-chain Fv (ScFv) domains can provide antigen-binding sites.

[0031] The terms “mAb/dAb” and dAb/mAb” are used herein to refer to antigen-binding constructs of the present invention. The two terms can be used interchangeably, and are intended to have the same meaning as used herein.

[0032] The term “constant heavy chain 1” is used herein to refer to the CH1 domain of an immunoglobulin heavy chain.

[0033] The term “constant light chain” is used herein to refer to the constant domain of an immunoglobulin light chain.

### BRIEF DESCRIPTION OF FIGURES

[0034] FIGS. 1 to 7: Examples of antigen-binding constructs

[0035] FIG. 8: Schematic diagram of mAbdAb constructs.

[0036] FIG. 9: SEC and SDS Page analysis of PascoH-G4S-474

[0037] FIG. 10: SEC and SDS Page analysis of PascoL-G4S-474

[0038] FIG. 11: SEC and SDS Page analysis of PascoH-474

[0039] FIG. 12: SEC and SDS Page analysis of PascoHL-G4S-474

[0040] FIG. 13: mAbdAb supernatants binding to human IL-13 in a direct binding ELISA

[0041] FIG. 14: mAbdAb supernatants binding to human IL-4 in a direct binding ELISA

[0042] FIG. 15: Purified mAbdAbs binding to human IL-13 in a direct binding ELISA

[0043] FIG. 16: purified mAbdAbs binding to human IL-4 in a direct binding ELISA

[0044] FIG. 17: mAbdAb supernatants binding to human IL-4 in a direct binding ELISA

[0045] FIG. 18: mAbdAb supernatants binding to human IL-13 in a direct binding ELISA

[0046] FIG. 19: purified mAbdAb binding to human IL-4 in a direct binding ELISA

[0047] FIG. 20A: purified mAbdAb binding to human IL-13 in a direct binding ELISA

[0048] FIG. 20B: purified mAbdAb binding to cynomolgus IL-13 in a direct binding ELISA

[0049] FIG. 21: mAbdAb binding kinetics for IL-4 using BIAcore™

[0050] FIG. 22: mAbdAb binding kinetics for IL-4 using BIAcore™

[0051] FIG. 23: mAbdAbs binding kinetics for IL-13 using BIAcore™

[0052] FIG. 24: Purified anti-IL13 mAb-anti-IL4dAbs ability to neutralise human IL-13 in a TF-1 cell bioassay

[0053] FIG. 25: Purified anti-IL13 mAb-anti-IL4dAbs ability to neutralise human IL-4 in a TF-1 cell bioassay

[0054] FIG. 26: purified anti-IL4 mAb-anti-IL13dAbs PascoH-G4S-474, PascoH-474, PascoL-G4S-474 and PascoHL-G4S-474 ability to neutralise human IL-4 in a TF-1 cell bioassay

[0055] FIG. 27: purified anti-IL4 mAb-anti-IL13dAbs, PascoH-G4S-474, PascoH-474, PascoL-G4S-474 and PascoHL-G4S-474 ability to neutralise human IL-13 in a TF-1 cell bioassay

[0056] FIG. 28: purified anti-IL4 mAb-anti-IL13dAbs, PascoH-G4S-474, PascoH-474, PascoL-G4S-474 and PascoHL-G4S-474 ability to simultaneously neutralise human IL-4 and human IL-13 in a dual neutralisation TF-1 cell bioassay

[0057] FIG. 29: DOM10-53-474 SEC-MALLS

[0058] FIG. 30: DOM9-112-210 SEC-MALLS

[0059] FIG. 31: DOM9-155-25 SEC-MALLS

[0060] FIG. 32: DOM9-155-25 SEC-MALLS Overlay of all three signals

[0061] FIG. 33: DOM9-155-147 SEC-MALLS

[0062] FIG. 34: DOM9-155-159 SEC-MALLS

[0063] FIG. 35: Control for MW assignment by SEC-MALLS: BSA

[0064] FIG. 36: schematic diagram of a trispecific mAbdAb molecule

[0065] FIG. 37: Trispecific mAbdAb IL18 mAb-210-474 (supernatants) binding to human IL-18 in direct binding ELISA

[0066] FIG. 38: Trispecific mAbdAb IL18 mAb-210-474 (supernatants) binding to human IL-13 in direct binding ELISA

[0067] FIG. 39: Trispecific mAbdAb IL18 mAb-210-474 (supernatants) binding to human IL-4 in direct binding ELISA

[0068] FIG. 40: Trispecific mAbdAb Mepo-210-474 (supernatant) binding to human IL-13 in direct binding ELISA

[0069] FIG. 41: Trispecific mAbdAb Mepo-210-474 (supernatant) binding to human IL-4 in direct binding ELISA

[0070] FIG. 42: Cloning of the anti-TNF/anti-EGFR mAb-dAb

[0071] FIG. 43. SDS-PAGE analysis of the anti-TNF/anti-EGFR mAb-dAb

[0072] FIG. 44. SEC profile of the anti-TNF/anti-EGFR mAb-dAb (Example 10)

[0073] FIG. 45: Anti-EGFR activity of Example 10

[0074] FIG. 46. Anti-TNF activity of Example 10

[0075] FIG. 47. SDS-PAGE analysis of the anti-TNF/anti-VEGF mAb-dAb (Example 11)

[0076] FIG. 48. SEC profile of the anti-TNF/anti-VEGF mAb-dAb (Example 11)

[0077] FIG. 49. Anti-VEGF activity of Example 11

[0078] FIG. 50. Anti-TNF activity of example 11

[0079] FIG. 51. Cloning of the anti-VEGF/anti-IL1R1 dAb-extended-IgG (Example 12)

[0080] FIG. 52. SDS-PAGE analysis of the anti-TNF/anti-VEGF dAb-extended IgG A (Example 12)

[0081] FIG. 53: SDS-PAGE analysis of the anti-TNF/anti-VEGF dAb-extended IgG B (Example 12)

[0082] FIG. 54. SEC profile of the anti-TNF/anti-VEGF dAb-extended IgG A (Example 12)

[0083] FIG. 55: SEC profile of the anti-TNF/anti-VEGF dAb-extended IgG B (Example 12)

[0084] FIG. 56. Anti-VEGF activity of Example 12 (DMS2091)

[0085] FIG. 57 Anti-VEGF activity of Example 12 (DMS2090)

[0086] FIG. 58. Anti-IL1R1 activity of Example 12 (DMS2090)

[0087] FIG. 59: Anti-IL1R1 activity of Example 12 (DMS2091)

[0088] FIG. 60: Cloning of the anti-TNF/anti-VEGF/anti-EGFR mAb-dAb (Example 13)

[0089] FIG. 61. SDS-PAGE analysis of the anti-TNF/anti-VEGF/anti-EGFR mAb-dAb (Example 13)

[0090] FIG. 62: Anti-VEGF activity of Example 13

[0091] FIG. 63: Anti-TNF activity of Example 13

[0092] FIG. 64: Anti-EGFR activity of Example 13

[0093] FIG. 65: SEC analysis of purified Bispecific antibodies, BPC1603 (A), BPC1604 (B), BPC1605 (C), BPC1606 (D)

[0094] FIG. 66. Binding of bispecific antibodies to immobilised IGF-1R

[0095] FIG. 67. Binding of Bispecific antibodies to immobilised VEGF

[0096] FIG. 68. Inhibition of ligand mediated receptor phosphorylation by various bispecific antibodies

[0097] FIG. 69: Inhibition of ligand mediated receptor phosphorylation by various bispecific antibodies

[0098] FIG. 70 ADCC assay with anti-CD20/IL-13 bispecific antibody

[0099] FIG. 71: ADCC assay with anti-CD20/IL-13 bispecific antibody

[0100] FIG. 72: ADCC assay with anti-CD20/IL-13 bispecific antibody using a shorter dose range

[0101] FIG. 73: ADCC assay with anti-CD20/IL-13 bispecific antibody using a shorter dose range

[0102] FIG. 74: CDC assay with anti-CD20/1 L-13 bispecific antibody

[0103] FIG. 75: CDC assay with anti-CD20/1 L-13 bispecific antibody

[0104] FIG. 76: BPC1803 and BPC1804 binding in recombinant human IGF-1R ELISA

[0105] FIG. 77: BPC1803 and BPC1804 binding in recombinant VEGF binding ELISA

[0106] FIG. 78: BPC1805 and BPC1806 binding in recombinant human IGF-1R ELISA

[0107] FIG. 79: BPC1805 and BPC1806 binding in recombinant human HER2 ELISA

[0108] FIG. 80: BPC1807 and BPC1808 binding in recombinant human IGF-1R ELISA

[0109] FIG. 81: BPC1807 and BPC1808 binding in recombinant human HER2 ELISA

[0110] FIG. 82: BPC1809 binding in recombinant human IL-4 ELISA

[0111] FIG. 83: BPC1809 binding in RNAse A ELISA.

[0112] FIG. 84: BPC1816 binding in recombinant human IL-4 ELISA

[0113] FIG. 85: BPC1816 binding in HEL ELISA

[0114] FIG. 86: BPC1801 and BPC 1802 binding in recombinant human IGF-1R ELISA

[0115] FIG. 87: BPC1801 and BPC1802 binding in recombinant human VEGFR2 ELISA

[0116] FIG. 88 BPC1823 and BPC 1822 binding in recombinant human IL-4 ELISA

[0117] FIG. 88b BPC1823 (higher concentration supernatant) binding in recombinant human IL-4 ELISA

[0118] FIG. 89: BPC1823 and BPC1822 binding in recombinant human TNF-α ELISA

[0119] FIG. 89b: BPC1823 (higher concentration supernatant) binding in recombinant human TNF-α ELISA

[0120] FIG. 90: SEC profile for PascoH-474 GS removed

[0121] FIG. 91: SEC profile for PascoH-TVAAPS-474 GS removed

[0122] FIG. 92: SEC profile for PascoH-GS-ASTKGPT-474 2^{nd} GS removed

[0123] FIG. 93: SEC profile for 586H-210 GS removed

[0124] FIG. 94: SEC profile for 586H-TVAAPS-210 GS removed

[0125] FIG. 95: SDS PAGE for PascoH-474 GS removed (lane B) and PascoH-TVAAPS-474 GS removed (lane A)

[0126] FIG. 96: SDS PAGE for PascoH-GS-ASTKGPT-474 2^{nd} GS removed [A=non-reducing conditions, B=reducing conditions]

[0127] FIG. 97: SDS PAGE for 586H-210 GS removed (lane A)

[0128] FIG. 98: SDS PAGE for 586H-TVAAPS-210 GS removed (lane A)

[0129] FIG. 99: Purified PascoH-474 GS removed and PascoH-TVAAPS-474 GS removed binding in human IL-4 ELISA

[0130] FIG. 100: Purified PascoH-474 GS removed and PascoH-TVAAPS-474 GS removed binding in human IL-13 ELISA

[0131] FIG. 101: Purified PascoH-474 GS removed, PascoH-TVAAPS-474 GS removed, PascoH-616 and PascoH-TVAAPS-616 binding in cynomolgus IL-13 ELISA

[0132] FIG. 102: mAbdAbs inhibition of human IL-4 binding to human IL-4Rα by ELISA

[0133] FIG. 103: mAbdAbs inhibition of human IL-4 binding to human IL-4Rα by ELISA

[0134] FIG. 104 Neutralisation of human IL-13 in TF-1 cell bioassays by mAbdAbs

[0135] FIG. 105: Neutralisation of cynomolgus IL-13 in TF-1 cell bioassays by mAbdAbs

[0136] FIG. 106: Neutralisation of human IL-4 in TF-1 cell bioassays by mAbdAbs

[0137] FIG. 107: Neutralisation of cynomolgus IL-4 in TF-1 cell bioassays by mAbdAbs

[0138] FIG. 108: Ability of mAbdAbs to inhibit binding of human IL-13 binding to human IL-13Rα2

[0139] FIG. 109: SEC profile for PascoH-616

[0140] FIG. 110: SEC profile for PascoH-TVAAPS_{—}616

[0141] FIG. 111: SDS PAGE for PascoH-616 [E1=non-reducing conditions, E2=reducing conditions]

[0142] FIG. 112: SDS PAGE for PascoH-TVAAPS-616 [A=non-reducing conditions, B=reducing conditions]

[0143] FIG. 113: purified PascoH-616 and PascoH-TVAAPS-616 binding in human IL-13 ELISA

[0144] FIG. 114: Neutralisation of human IL-13 in TF-1 cell bioassays by mAbdAbs

[0145] FIG. 114a: Neutralisation of cynomolgus IL-13 in TF-1 cell bioassays by mAbdAbs

[0146] FIG. 115: Inhibition of IL-4 activity by PascoH-474 GS removed

[0147] FIG. 116: Inhibition of IL-13 activity by PascoH-474 GS removed

[0148] FIG. 117: Inhibition of IL-4 activity by 586-TVAAPS-210

[0149] FIG. 118: Inhibition of IL-13 activity by 586-TVAAPS-210

[0150] FIG. 119: Inhibition of IL-4 activity by Pascolizumab

[0151] FIG. 120: Inhibition of IL-4 activity by DOM9-112-210

[0152] FIG. 121: Inhibition of IL-13 activity by anti-IL13 mAb

[0153] FIG. 122: Inhibition of IL-13 activity by DOM10-53-474

[0154] FIG. 123: Activity of control mAb and dAb in IL-4 whole blood assay

[0155] FIG. 124: Activity of control mAb and dAb in IL-13 whole blood assay

[0156] FIG. 125: The concentration of drug remaining at various time points post-dose assessed by ELISA against both TNF & EGFR.

[0157] FIG. 126: The concentration of drug remaining at various time points post-dose assessed by ELISA against both TNF & VEGF.

[0158] FIG. 127: The concentration of drug remaining at various time points post-dose assessed by ELISA against both IL1R1 & VEGF.

[0159] FIG. 128: SDS-PAGE of the purified DMS4010

[0160] FIG. 129: SEC profile of the purified DMS4010

[0161] FIG. 130: Anti-EGFR potency of DMS4010

[0162] FIG. 131: anti-VEGF receptor binding assay

[0163] FIG. 132: pharmacokinetic profile of the dual targeting anti-EGFR/anti-VEGF mAbdAb

[0164] FIG. 133: SDS-PAGE analysis purified DMS4011

[0165] FIG. 134: SEC profile of the purified DMS4011

[0166] FIG. 135: Anti-EGFR potency of DMS4011

[0167] FIG. 136: DMS4011 in anti-VEGF receptor binding assay

[0168] FIG. 137: SDS-PAGE analysis of the purified samples DMS4023 and DMS4024

[0169] FIG. 138: The SEC profile for DMS4023

[0170] FIG. 139: The SEC profile for DMS4024

[0171] FIG. 140: Anti-EGFR potency of the mAbdAb DMS4023

[0172] FIG. 141: DMS4023 and DMS4024 in anti-VEGF receptor binding assay

[0173] FIG. 142: SDS-PAGE analysis of the purified DMS4009

[0174] FIG. 143: The SEC profile for DMS4009

[0175] FIG. 144: Anti-EGFR potency of the mAbdAb DMS4009

[0176] FIG. 145: DMS4009 in anti-VEGF receptor binding assay

[0177] FIG. 146: SDS-PAGE analysis of the purified DMS4029

[0178] FIG. 147: The SEC profile for DMS4029

[0179] FIG. 148: Anti-EGFR potency of the mAbdAb DMS4029

[0180] FIG. 149: DMS4029 in the IL-13 cell-based neutralisation assay

[0181] FIG. 150: SDS-PAGE analysis of the purified samples DMS4013 and DMS4027

[0182] FIG. 151: The SEC profile for DMS4013

[0183] FIG. 152: The SEC profile for DMS4027

[0184] FIG. 153: Anti-EGFR potency of the mAbdAb DMS4013

[0185] FIG. 154: DMS4013 in anti-VEGF receptor binding assay

[0186] FIG. 155: BPC1616 binding in recombinant human IL-12 ELISA

[0187] FIG. 156: BPC1616 binding in recombinant human IL-18 ELISA

[0188] FIG. 157: BPC1616 binding in recombinant human IL-4 ELISA

[0189] FIG. 158: BPC1008, 1009 and BPC1010 binding in recombinant human IL-4 ELISA

[0190] FIG. 159: BPC1008 binding in recombinant human IL-5 ELISA

[0191] FIG. 160: BPC1008, 1009 and BPC1010 binding in recombinant human IL-13 ELISA

[0192] FIG. 161: BPC1017 and BPC1018 binding in recombinant human c-MET ELISA

[0193] FIG. 162: BPC1017 and BPC1018 binding in recombinant human VEGF ELISA

[0194] FIG. 163: SEC profile for PascoH-TVAAPS-546

[0195] FIG. 164: SEC profile for PascoH-TVAAPS-567

[0196] FIG. 165: SDS PAGE for PascoH-TVAAPS-546 [A=non-reducing conditions, B=reducing conditions]

[0197] FIG. 166: SDS PAGE for PascoH-TVAAPS-567 [A=non-reducing conditions, B=reducing conditions]

[0198] FIG. 167: neutralisation data for human IL-13 in the TF-1 cell bioassay

[0199] FIG. 168: neutralisation data for cynomolgus IL-13 in the TF-1 cell bioassay

[0200] FIG. 169: mAbdAbs containing alternative isotypes binding in human IL-4 ELISA

[0201] FIG. 170: mAbdAbs containing alternative isotypes binding in human IL-13 ELISA

[0202] FIG. 171: BPC1818 and BPC1813 binding in recombinant human EGFR ELISA

[0203] FIG. 172: BPC1818 and BPC1813 binding in recombinant human VEGFR2 ELISA

[0204] FIG. 173: anti-IL5 mAb-anti-IL13dAb binding in IL-13 ELISA

[0205] FIG. 174: anti-IL5 mAb-anti-IL13dAb binding in IL-5 ELISA

[0206] FIG. 175: BPC1812 binding in recombinant human VEGFR2 ELISA

[0207] FIG. 176: BPC1812 binding in recombinant human EGFR ELISA

[0208] FIG. 177: mAbdAb binding in human IL-13 ELISA

### DETAILED DESCRIPTION OF INVENTION

[0209] The present invention relates to an antigen-binding construct comprising a protein scaffold which is linked to one or more epitope-binding domains wherein the antigen-binding construct has at least two antigen binding sites at least one of which is from an epitope binding domain and at least one of which is from a paired VH/VL domain.

[0210] Such antigen-binding constructs comprise a protein scaffold, for example an Ig scaffold such as IgG, for example a monoclonal antibody, which is linked to one or more epitope-binding domains, for example a domain antibody, wherein the binding construct has at least two antigen binding sites, at least one of which is from an epitope binding domain, and to methods of producing and uses thereof, particularly uses in therapy.

[0211] Some examples of antigen-binding constructs according to the invention are set out in FIG. 1.

[0212] The antigen-binding constructs of the present invention are also referred to as mAbdAbs.

[0213] In one embodiment the protein scaffold of the antigen-binding construct of the present invention is an Ig scaffold, for example an IgG scaffold or IgA scaffold. The IgG scaffold may comprise all the domains of an antibody (i.e. CH1, CH2, CH3, VH, VL). The antigen-binding construct of the present invention may comprise an IgG scaffold selected from IgG1, IgG2, IgG3, IgG4 or IgG4PE.

[0214] The antigen-binding construct of the present invention has at least two antigen binding sites, for examples it has two binding sites, for example where the first binding site has specificity for a first epitope on an antigen and the second binding site has specificity for a second epitope on the same antigen. In a further embodiment there are 4 antigen binding sites, or 6 antigen binding sites, or 8 antigen binding sites, or 10 or more antigen-binding sites. In one embodiment the antigen binding construct has specificity for more than one antigen, for example two antigens, or for three antigens, or for four antigens.

[0215] In another aspect the invention relates to an antigen-binding construct comprising at least one homodimer comprising two or more structures of formula I:

[chemical structure]

[0216] wherein
[0217] X represents a constant antibody region comprising constant heavy domain 2 and constant heavy domain 3;
[0218] R¹, R⁴, R⁷ and R³ represent a domain independently selected from an epitope-binding domain;
[0219] R² represents a domain selected from the group consisting of constant heavy chain 1, and an epitope-binding domain;
[0220] R³ represents a domain selected from the group consisting of a paired VH and an epitope-binding domain;
[0221] R⁵ represents a domain selected from the group consisting of constant light chain, and an epitope-binding domain;
[0222] R⁶ represents a domain selected from the group consisting of a paired VL and an epitope-binding domain;
[0223] n represents an integer independently selected from: 0, 1, 2, 3 and 4;
[0224] m represents an integer independently selected from: 0 and 1,
[0225] wherein the Constant Heavy chain 1 and the Constant Light chain domains are associated;
[0226] wherein at least one epitope binding domain is present;
[0227] and when R³ represents a paired VH domain, R⁶ represents a paired VL domain, so that the two domains are together capable of binding antigen.
[0228] In one embodiment R⁶ represents a paired VL and R³ represents a paired VH.
[0229] In a further embodiment either one or both of R⁷ and R³ represent an epitope binding domain.
[0230] In yet a further embodiment either one or both of R¹ and R⁴ represent an epitope binding domain.
[0231] In one embodiment R⁴ is present.
[0232] In one embodiment R¹, R⁷ and R³ represent an epitope binding domain.
[0233] In one embodiment R¹, R⁷ and R⁸, and R⁴ represent an epitope binding domain.
[0234] In one embodiment (R¹)ₙ, (R²)ₘ, (R⁴)ₘ and (R⁵)ₘ=0, i.e. are not present, R³ is a paired VH domain, R⁶ is a paired VL domain, R³ is a VH dAb, and R⁷ is a VL dAb.
[0235] In another embodiment (R¹)ₙ, (R²)ₘ, (R⁴)ₘ and (R⁵)ₘ are 0, i.e. are not present, R³ is a paired VH domain, R⁵ is a paired VL domain, R³ is a VH dAb, and (R⁷)ₘ=0 i.e. not present.
[0236] In another embodiment (R²)ₘ, and (R⁵)ₘ are 0, i.e. are not present, R¹ is a dAb, R⁴ is a dAb, R³ is a paired VH domain, R⁶ is a paired VL domain, (R³)ₘ and (R⁷)ₘ=0 i.e. not present.

[0237] In one embodiment of the present invention the epitope binding domain is a dAb.

[0238] It will be understood that any of the antigen-binding constructs described herein will be capable of neutralising one or more antigens.

[0239] The term “neutralises” and grammatical variations thereof as used throughout the present specification in relation to antigen binding constructs of the invention means that a biological activity of the target is reduced, either totally or partially, in the presence of the antigen binding constructs of the present invention in comparison to the activity of the target in the absence of such antigen binding constructs. Neutralisation may be due to but not limited to one or more of blocking ligand binding, preventing the ligand activating the receptor, down regulating the receptor or affecting effector functionality.

[0240] Levels of neutralisation can be measured in several ways, for example by use of any of the assays as set out in the examples and methods below, for example in an assay which measures inhibition of ligand binding to receptor which may be carried out for example as described in any one of Methods 12, 19 or 21 or Example 32. The neutralisation of VEGF, IL-4, IL-13 or HGF in these assays is measured by assessing the decreased binding between the ligand and its receptor in the presence of neutralising antigen binding construct.

[0241] Levels of neutralisation can also be measured, for example in a TF1 assay which may be carried out for example as described in Method 8, 9, 10, 20 or 21. The neutralisation of IL-13, IL-4 or both of these cytokines in this assay is measured by assessing the inhibition of TF1 cell proliferation in the presence of neutralising antigen binding construct. Alternatively neutralisation could be measured in an EGFR phosphorylation assay which may be carried out for example as described in Method 13. The neutralisation of EGFR in this assay is measured by assessing the inhibition of tyrosine kinase phosphorylation of the receptor in the presence of neutralising antigen binding construct. Or, neutralisation could be measured in an IL-8 secretion assay in MRC-5 cells which may be carried out for example as described in Method 14 or 15. The neutralisation of TNFα or IL-1R1 in this assay is measured by assessing the inhibition of IL-8 secretion in the presence of neutralising antigen binding construct.

[0242] Other methods of assessing neutralisation, for example, by assessing the decreased binding between the ligand and its receptor in the presence of neutralising antigen binding construct are known in the art, and include, for example, Biacore™ assays.

[0243] In an alternative aspect of the present invention there is provided antigen binding constructs which have at least substantially equivalent neutralising activity to the antibodies exemplified herein, for example antigen binding constructs which retain the neutralising activity of 586H-TVAAPS-210, or PascoH-G4S-474, or PascoH-474, PascoH-474 GS removed, PascoL-G4S-474 or PascoHL-G4S-474 in the TF1 cell proliferation assay, or inhibition of pSTAT6 signalling assay as set out in Examples 4 and 20 respectively, or for example antigen binding constructs which retain the neutralising activity of BPC1603, BPC1604, BPC1605, BPC1606 in the VEGFR binding assay or inhibition of IGF-1R receptor phosphorylation as set out in Examples 14.6 and 14.7.

[0244] The antigen binding constructs of the invention include those which have specificity for IL-13, for example which comprise an epitope-binding domain which is capable of binding to IL-13, or which comprise a paired VH/VL which binds to IL-13. The antigen binding construct may comprise an antibody which is capable of binding to IL-13. The antigen binding construct may comprise a dAb which is capable of binding to IL-13.

[0245] In one embodiment the antigen-binding construct of the present invention has specificity for more than one antigen, for example where it is capable of binding two or more antigens selected from IL-13, IL-5, and IL-4, for example where it is capable of binding IL-13 and IL-4, or where it is capable of binding IL-13 and IL-5, or where it is capable of binding IL-5 and IL-4.

[0246] In one embodiment the antigen-binding construct of the present invention has specificity for more than one antigen, for example where it is capable of binding two or more antigens selected from IL-13, IL-5, and IL-4, for example where it is capable of binding IL-13 and IL-4 simultaneously, or where it is capable of binding IL-13 and IL-5 simultaneously, or where it is capable of binding IL-5 and IL-4 simultaneously.

[0247] It will be understood that any of the antigen-binding constructs described herein may be capable of binding two or more antigens simultaneously, for example, as determined by stochiometry analysis by using a suitable assay such as that described in the Examples section, method 7.

[0248] Examples of antigen-binding constructs of the invention include IL-13 antibodies which have an epitope binding domain with a specificity for IL-4, for example an anti-IL-4 dAb, attached to the c-terminus or the n-terminus of the heavy chain or the c-terminus or n-terminus of the light chain, for example the mAbdAb having the heavy chain sequence set out in SEQ ID NO:16 to 39, SEQ ID NO:41 to 43, SEQ ID NO:87 to 90, SEQ ID NO:151, SEQ ID NO:152 or SEQ ID NO:155. Antigen binding constructs of the present invention include IL-13 antibodies with an IL-4 epitope binding domain attached to the n-terminus of the heavy chain. Antigen binding constructs of the present invention include IL-13 antibodies with an IL-4 epitope binding domain attached to the n-terminus of the light chain. Antigen binding constructs of the present invention include IL-13 antibodies with an IL-4 epitope binding domain attached to the c-terminus of the heavy chain. Antigen binding constructs of the present invention include IL-13 antibodies with an IL-4 epitope binding domain attached to the c-terminus of the light chain. Such antigen-binding constructs may also have one or more further epitope binding domains with the same or different antigen-specificity attached to the c-terminus and/or the n-terminus of the heavy chain and/or the c-terminus and/or n-terminus of the light chain.

[0249] Examples of such antigen-binding constructs include IL-4 antibodies which have an epitope binding domain with a specificity for IL-13, for example an anti-IL-13 dAb, attached to the c-terminus or the n-terminus of the heavy chain or the c-terminus or n-terminus of the light chain, for example the mAbdAb having the heavy chain sequence set out in SEQ ID NO:48 to 53, SEQ ID NO:91 SEQ ID NO:92, SEQ ID NO:149, SEQ ID NO:150, or SEQ ID NO:157 to 160, and/or the light chain sequence set out in SEQ ID NO:54 to 59. Antigen binding constructs of the present invention include IL-4 antibodies with an IL-13 epitope binding domain attached to the n-terminus of the heavy chain. Antigen binding constructs of the present invention include IL-4 antibodies with an IL-13 epitope binding domain attached to the n-terminus of the light chain. Antigen binding constructs of the present invention include IL-4 antibodies with an IL-13 epitope binding domain attached to the c-terminus of the heavy chain. Antigen binding constructs of the present invention include IL-4 antibodies with an IL-13 epitope binding domain attached to the c-terminus of the light chain. Such antigen-binding constructs may also have one or more further epitope binding domains with the same or different antigen-specificity attached to the c-terminus and/or the n-terminus of the heavy chain and/or the c-terminus and/or n-terminus of the light chain.

[0250] Examples of such antigen-binding constructs include IL-13 antibodies which have an epitope binding domain with a specificity for IL-5, for example an anti-IL-5 dAb, attached to the c-terminus or the n-terminus of the heavy chain or the c-terminus or n-terminus of the light chain. Antigen binding constructs of the present invention include IL-13 antibodies with an IL-5 epitope binding domain attached to the n-terminus of the heavy chain. Antigen binding constructs of the present invention include IL-13 antibodies with an IL-5 epitope binding domain attached to the n-terminus of the light chain. Antigen binding constructs of the present invention include IL-13 antibodies with an IL-5 epitope binding domain attached to the c-terminus of the heavy chain. Antigen binding constructs of the present invention include IL-13 antibodies with an IL-5 epitope binding domain attached to the c-terminus of the light chain. Such antigen-binding constructs may also have one or more further epitope binding domains with the same or different antigen-specificity attached to the c-terminus and/or the n-terminus of the heavy chain and/or the c-terminus and/or n-terminus of the light chain.

[0251] Examples of such antigen-binding constructs include IL-5 antibodies which have an epitope binding domain with a specificity for IL-13, for example an anti-IL-13 dAb, attached to the c-terminus or the n-terminus of the heavy chain or the c-terminus or n-terminus of the light chain, for example the mAbdAb having the light chain sequence set out in SEQ ID NO: 72.

[0252] Antigen binding constructs of the present invention include IL-5 antibodies with an IL-13 epitope binding domain attached to the n-terminus of the heavy chain. Antigen binding constructs of the present invention include IL-5 antibodies with an IL-13 epitope binding domain attached to the n-terminus of the light chain. Antigen binding constructs of the present invention include IL-5 antibodies with an IL-13 epitope binding domain attached to the c-terminus of the heavy chain. Antigen binding constructs of the present invention include IL-5 antibodies with an IL-13 epitope binding domain attached to the c-terminus of the light chain. Such antigen-binding constructs may also have one or more further epitope binding domains with the same or different antigen-specificity attached to the c-terminus and/or the n-terminus of the heavy chain and/or the c-terminus and/or n-terminus of the light chain.

[0253] Examples of such antigen-binding constructs include IL-4 antibodies which have an epitope binding domain with a specificity for IL-5, for example an anti-IL-5 dAb, attached to the c-terminus or the n-terminus of the heavy chain or the c-terminus or n-terminus of the light chain. Antigen binding constructs of the present invention include IL-4 antibodies with an IL-5 epitope binding domain attached to the n-terminus of the heavy chain. Antigen binding constructs of the present invention include IL-4 antibodies with an IL-5 epitope binding domain attached to the n-terminus of the light chain. Antigen binding constructs of the present invention include IL-4 antibodies with an IL-5 epitope binding domain attached to the c-terminus of the heavy chain. Antigen binding constructs of the present invention include IL-4 antibodies with an IL-5 epitope binding domain attached to the c-terminus of the light chain. Such antigen-binding constructs may also have one or more further epitope binding domains with the same or different antigen-specificity attached to the c-terminus and/or the n-terminus of the heavy chain and/or the c-terminus and/or n-terminus of the light chain.

[0254] Examples of such antigen-binding constructs include IL-5 antibodies which have an epitope binding domain with a specificity for IL-4, for example an anti-IL-4 dAb, attached to the c-terminus or the n-terminus of the heavy chain or the c-terminus or n-terminus of the light chain, for example the mAbdAb having the heavy chain sequence set out in SEQ ID NO: 71.

[0255] Antigen binding constructs of the present invention include IL-5 antibodies with an IL-4 epitope binding domain attached to the n-terminus of the heavy chain. Antigen binding constructs of the present invention include IL-5 antibodies with an IL-4 epitope binding domain attached to the n-terminus of the light chain. Antigen binding constructs of the present invention include IL-5 antibodies with an IL-4 epitope binding domain attached to the c-terminus of the heavy chain. Antigen binding constructs of the present invention include IL-5 antibodies with an IL-4 epitope binding domain attached to the c-terminus of the light chain. Such antigen-binding constructs may also have one or more further epitope binding domains with the same or different antigen-specificity attached to the c-terminus and/or the n-terminus of the heavy chain and/or the c-terminus and/or n-terminus of the light chain.

[0256] The invention also provides a trispecific binding construct which is capable of binding to IL-4, IL-13 and IL-5.

[0257] Examples of such antigen-binding constructs include IL-5 antibodies which have an epitope binding domain with a specificity for IL-4, for example an anti-IL-4 dAb, attached to the c-terminus or the n-terminus of the heavy chain or the c-terminus or n-terminus of the light chain and an epitope binding domain with a specificity for IL-13, for example an anti-IL-13 dAb, attached to the c-terminus or the n-terminus of the heavy chain or the c-terminus or n-terminus of the light chain.

[0258] Antigen binding constructs of the present invention include IL-5 antibodies with an IL-4 epitope binding domain attached to the n-terminus of the heavy chain and an IL-13 epitope binding domain attached to the n-terminus of the light chain.

[0259] Antigen binding constructs of the present invention include IL-5 antibodies with an IL-4 epitope binding domain attached to the n-terminus of the heavy chain and an IL-13 epitope binding domain attached to the c-terminus of the light chain.

[0260] Antigen binding constructs of the present invention include IL-5 antibodies with an IL-4 epitope binding domain attached to the n-terminus of the heavy chain and an IL-13 epitope binding domain attached to the c-terminus of the heavy chain.

[0261] Antigen binding constructs of the present invention include IL-5 antibodies with an IL-4 epitope binding domain attached to the n-terminus of the light chain and an IL-13 epitope binding domain attached to the c-terminus of the light chain.

[0262] Antigen binding constructs of the present invention include IL-5 antibodies with an IL-4 epitope binding domain attached to the n-terminus of the light chain and an IL-13 epitope binding domain attached to the c-terminus of the heavy chain.

[0263] Antigen binding constructs of the present invention include IL-5 antibodies with an IL-4 epitope binding domain attached to the n-terminus of the light chain and an IL-13 epitope binding domain attached to the n-terminus of the heavy chain.

[0264] Antigen binding constructs of the present invention include IL-5 antibodies with an IL-4 epitope binding domain attached to the c-terminus of the heavy chain and an IL-13 epitope binding domain attached to the c-terminus of the light chain.

[0265] Antigen binding constructs of the present invention include IL-5 antibodies with an IL-4 epitope binding domain attached to the c-terminus of the heavy chain and an IL-13 epitope binding domain attached to the n-terminus of the light chain.

[0266] Antigen binding constructs of the present invention include IL-5 antibodies with an IL-4 epitope binding domain attached to the c-terminus of the heavy chain and an IL-13 epitope binding domain attached to the n-terminus of the heavy chain.

[0267] Antigen binding constructs of the present invention include IL-5 antibodies with an IL-4 epitope binding domain attached to the c-terminus of the light chain and an IL-13 epitope binding domain attached to the c-terminus of the heavy chain.

[0268] Antigen binding constructs of the present invention include IL-5 antibodies with an IL-4 epitope binding domain attached to the c-terminus of the light chain and an IL-13 epitope binding domain attached to the n-terminus of the heavy chain.

[0269] Antigen binding constructs of the present invention include IL-5 antibodies with an IL-4 epitope binding domain attached to the c-terminus of the light chain and an IL-13 epitope binding domain attached to the n-terminus of the light chain.

[0270] Such antigen-binding constructs may also have one or more further epitope binding domains with the same or different antigen-specificity attached to the c-terminus and/or the n-terminus of the heavy chain and/or the c-terminus and/or n-terminus of the light chain.

[0271] The antigen binding constructs of the invention include those which have specificity for IL-18, for example which comprises an epitope-binding domain which is capable of binding to IL-18, or which comprises a paired VH/VL which binds to IL-18.

[0272] The antigen binding construct may comprise an antibody which is capable of binding to IL-18. The antigen binding construct may comprise a dAb which is capable of binding to IL-18.

[0273] The invention also provides a trispecific binding construct which is capable of binding to IL-4, IL-13 and IL-18.

[0274] Examples of such antigen-binding constructs include IL-18 antibodies which have an epitope binding domain with a specificity for IL-4, for example an anti-IL-4 dAb, attached to the c-terminus or the n-terminus of the heavy chain or the c-terminus or n-terminus of the light chain and an epitope binding domain with a specificity for IL-13, for example an anti-IL-13 dAb, attached to the c-terminus or the n-terminus of the heavy chain or the c-terminus or n-terminus of the light chain.

[0275] Antigen binding constructs of the present invention include IL-18 antibodies with an IL-4 epitope binding domain attached to the n-terminus of the heavy chain and an IL-13 epitope binding domain attached to the n-terminus of the light chain.

[0276] Antigen binding constructs of the present invention include IL-18 antibodies with an IL-4 epitope binding domain attached to the n-terminus of the heavy chain and an IL-13 epitope binding domain attached to the c-terminus of the light chain.

[0277] Antigen binding constructs of the present invention include IL-18 antibodies with an IL-4 epitope binding domain attached to the n-terminus of the heavy chain and an IL-13 epitope binding domain attached to the c-terminus of the heavy chain.

[0278] Antigen binding constructs of the present invention include IL-18 antibodies with an IL-4 epitope binding domain attached to the n-terminus of the light chain and an IL-13 epitope binding domain attached to the c-terminus of the light chain.

[0279] Antigen binding constructs of the present invention include IL-18 antibodies with an IL-4 epitope binding domain attached to the n-terminus of the light chain and an IL-13 epitope binding domain attached to the c-terminus of the heavy chain.

[0280] Antigen binding constructs of the present invention include IL-18 antibodies with an IL-4 epitope binding domain attached to the n-terminus of the light chain and an IL-13 epitope binding domain attached to the n-terminus of the heavy chain.

[0281] Antigen binding constructs of the present invention include IL-18 antibodies with an IL-4 epitope binding domain attached to the c-terminus of the heavy chain and an IL-13 epitope binding domain attached to the c-terminus of the light chain.

[0282] Antigen binding constructs of the present invention include IL-18 antibodies with an IL-4 epitope binding domain attached to the c-terminus of the heavy chain and an IL-13 epitope binding domain attached to the n-terminus of the light chain.

[0283] Antigen binding constructs of the present invention include IL-18 antibodies with an IL-4 epitope binding domain attached to the c-terminus of the heavy chain and an IL-13 epitope binding domain attached to the n-terminus of the heavy chain.

[0284] Antigen binding constructs of the present invention include IL-18 antibodies with an IL-4 epitope binding domain attached to the c-terminus of the light chain and an IL-13 epitope binding domain attached to the c-terminus of the heavy chain.

[0285] Antigen binding constructs of the present invention include IL-18 antibodies with an IL-4 epitope binding domain attached to the c-terminus of the light chain and an IL-13 epitope binding domain attached to the n-terminus of the heavy chain.

[0286] Antigen binding constructs of the present invention include IL-18 antibodies with an IL-4 epitope binding domain attached to the c-terminus of the light chain and an IL-13 epitope binding domain attached to the n-terminus of the light chain.

[0287] Such antigen-binding constructs may also have one or more further epitope binding domains with the same or different antigen-specificity attached to the c-terminus and/or the n-terminus of the heavy chain and/or the c-terminus and/or n-terminus of the light chain.

[0288] The antigen binding constructs of the invention include those which have specificity for TNFα, for example which comprises an epitope-binding domain which is capable of binding to TNFα, or which comprises a paired VH/VL which binds to TNFα. The antigen binding construct may comprise an antibody which is capable of binding to TNFα. The antigen binding construct may comprise a dAb which is capable of binding to TNFα.

[0289] In one embodiment the antigen-binding construct of the present invention has specificity for more than one antigen, for example where it is capable of binding two or more antigens selected from TNFα, EGFR and VEGF, for example where it is capable of binding TNFα and EGFR, or where it is capable of binding TNFα and VEGF, or where it is capable of binding EGFR and VEGF. Examples of such antigen-binding constructs include TNFα antibodies which have an epitope binding domain with a specificity for EGFR, for example an anti-EGFR dAb, attached to the c-terminus or the n-terminus of the heavy chain or the c-terminus or n-terminus of the light chain, for example a mAbdAb having the heavy chain sequence set out in SEQ ID NO: 74, and/or the light chain sequence set out in SEQ ID NO: 79.

[0290] Antigen binding constructs of the present invention include TNFα antibodies with an EGFR epitope binding domain attached to the n-terminus of the heavy chain. Antigen binding constructs of the present invention include TNFα antibodies with an EGFR epitope binding domain attached to the n-terminus of the light chain. Antigen binding constructs of the present invention include TNFα antibodies with an EGFR epitope binding domain attached to the c-terminus of the heavy chain. Antigen binding constructs of the present invention include TNFα antibodies with an EGFR epitope binding domain attached to the c-terminus of the light chain. Such antigen-binding constructs may also have one or more further epitope binding domains with the same or different antigen-specificity attached to the c-terminus and/or the n-terminus of the heavy chain and/or the c-terminus and/or n-terminus of the light chain.

[0291] Antigen binding constructs of the present invention include EGFR antibodies with an TNFα epitope binding domain attached to the n-terminus of the heavy chain. Antigen binding constructs of the present invention include EGFR antibodies with an TNFα epitope binding domain attached to the n-terminus of the light chain. Antigen binding constructs of the present invention include EGFR antibodies with an TNFα epitope binding domain attached to the c-terminus of the heavy chain. Antigen binding constructs of the present invention include EGFR antibodies with a TNFα epitope binding domain attached to the c-terminus of the light chain. Such antigen-binding constructs may also have one or more further epitope binding domains with the same or different antigen-specificity attached to the c-terminus and/or the n-terminus of the heavy chain and/or the c-terminus and/or n-terminus of the light chain.

[0292] Examples of such antigen-binding constructs include TNFα antibodies which have an epitope binding domain with a specificity for VEGF, for example an anti-VEGF dAb, attached to the c-terminus or the n-terminus of the heavy chain or the c-terminus or n-terminus of the light chain, for example a mAbdAb having the heavy chain sequence set out in SEQ ID NO: 75, 78 or 185.

[0293] The antigen-binding construct of the present invention may have specificity for more than one antigen, for example where it is capable of binding TNFα, and one or both antigens selected from IL-4 and IL-13, for example where it is capable of binding TNFα and IL-4, or where it is capable of binding TNFα and IL-13, or where it is capable of binding TNFα and IL-13 and IL-4. Examples of such antigen-binding constructs include IL-13 antibodies which have an epitope binding domain with a specificity for TNFα, for example an anti-TNFα adnectin, attached to the c-terminus or the n-terminus of the heavy chain or the c-terminus or n-terminus of the light chain, for example a mAbdAb having the heavy chain sequence set out in SEQ ID NO: 134 or 135. Other examples of such antigen-binding constructs include IL-4 antibodies which have an epitope binding domain with a specificity for TNFα, for example an anti-TNFα adnectin, attached to the c-terminus or the n-terminus of the heavy chain or the c-terminus or n-terminus of the light chain, for example a mAbdAb having the heavy chain sequence set out in SEQ ID NO: 146 or 147.

[0294] Antigen binding constructs of the present invention include TNFα antibodies with an VEGF epitope binding domain attached to the n-terminus of the heavy chain. Antigen binding constructs of the present invention include TNFα antibodies with an VEGF epitope binding domain attached to the n-terminus of the light chain. Antigen binding constructs of the present invention include TNFα antibodies with an VEGF epitope binding domain attached to the c-terminus of the heavy chain. Antigen binding constructs of the present invention include TNFα antibodies with an VEGF epitope binding domain attached to the c-terminus of the light chain. Such antigen-binding constructs may also have one or more further epitope binding domains with the same or different antigen-specificity attached to the c-terminus and/or the n-terminus of the heavy chain and/or the c-terminus and/or n-terminus of the light chain.

[0295] Antigen binding constructs of the present invention include VEGF antibodies with an TNFα epitope binding domain attached to the n-terminus of the heavy chain. Antigen binding constructs of the present invention include VEGF antibodies with an TNFα epitope binding domain attached to the n-terminus of the light chain. Antigen binding constructs of the present invention include VEGF antibodies with an TNFα epitope binding domain attached to the c-terminus of the heavy chain. Antigen binding constructs of the present invention include VEGF antibodies with an TNFα epitope binding domain attached to the c-terminus of the light chain. Such antigen-binding constructs may also have one or more further epitope binding domains with the same or different antigen-specificity attached to the c-terminus and/or the n-terminus of the heavy chain and/or the c-terminus and/or n-terminus of the light chain.

[0296] The antigen binding constructs of the invention include those which have specificity for CD-20, for example which comprises an epitope-binding domain which is capable of binding to CD-20, or which comprises a paired VH/VL which binds to CD-20. The antigen binding construct may comprise an antibody which is capable of binding to CD-20, for example it may comprise an antibody having the heavy and light chain sequences of SEQ ID NO: 120 and 117. The antigen binding construct may comprise a dAb which is capable of binding to CD-20. Examples of mAbdAbs with specificity for CD-20 are those having the heavy chain sequence set out in SEQ ID NO: 116, 118 or those having the light chain sequence set out in SEQ ID NO: 119 or 121.

[0297] Such antigen-binding constructs may also have one or more further epitope binding domains with the same or different antigen-specificity attached to the c-terminus and/or the n-terminus of the heavy chain and/or the c-terminus and/or n-terminus of the light chain.

[0298] The antigen binding constructs of the invention include those which have specificity for IL1R1, for example which comprise an epitope-binding domain which is capable of binding to IL1R1, or which comprises a paired VH/VL which binds to IL1R1.

[0299] The antigen binding construct may comprise an antibody which is capable of binding to IL1R1. The antigen binding construct may comprise a dAb which is capable of binding to IL1R1.

[0300] In one embodiment the antigen-binding construct of the present invention has specificity for more than one antigen, for example where it is capable of binding IL1R1 and a second antigen, for example where it is capable of binding IL1R1 and VEGF. Examples of such antigen-binding constructs include IL1R1 antibodies which have an epitope binding domain with a specificity for VEGF, for example an anti-VEGF dAb, attached to the c-terminus or the n-terminus of the heavy chain or the c-terminus or n-terminus of the light chain, for example a mAbdAb having the light chain sequence set out in SEQ ID NO: 77.

[0301] Antigen binding constructs of the present invention include IL1R1 antibodies with an VEGF epitope binding domain attached to the n-terminus of the heavy chain. Antigen binding constructs of the present invention include IL1R1 antibodies with an VEGF epitope binding domain attached to the n-terminus of the light chain. Antigen binding constructs of the present invention include IL1R1 antibodies with a VEGF epitope binding domain attached to the c-terminus of the heavy chain. Antigen binding constructs of the present invention include IL1R1 antibodies with a VEGF epitope binding domain attached to the c-terminus of the light chain. Such antigen-binding constructs may also have one or more further epitope binding domains with the same or different antigen-specificity attached to the c-terminus and/or the n-terminus of the heavy chain and/or the c-terminus and/or n-terminus of the light chain.

[0302] Antigen binding constructs of the present invention include VEGF antibodies with an IL1R1 epitope binding domain attached to the n-terminus of the heavy chain. Antigen binding constructs of the present invention include VEGF antibodies with an IL1R1 epitope binding domain attached to the n-terminus of the light chain. Antigen binding constructs of the present invention include VEGF antibodies with an IL1R1 epitope binding domain attached to the c-terminus of the heavy chain. Antigen binding constructs of the present invention include VEGF antibodies with an IL1R1 epitope binding domain attached to the c-terminus of the light chain. Such antigen-binding constructs may also have one or more further epitope binding domains with the same or different antigen-specificity attached to the c-terminus and/or the n-terminus of the heavy chain and/or the c-terminus and/or n-terminus of the light chain.

[0303] The antigen binding constructs of the invention include those which have specificity for EGFR, for example which comprises an epitope-binding domain which is capable of binding to EGFR, or which comprises a paired VH/VL which binds to EGFR. The antigen binding construct may comprise an antibody which is capable of binding to EGFR. The antigen binding construct may comprise a dAb which is capable of binding to EGFR. Some examples of such antigen binding construct will be capable of binding to an epitope on EGFR comprising SEQ ID NO:103, for example an antigen binding construct comprising one or more of the CDRs set out in SEQ ID NO: 97 to SEQ ID NO: 102 and SEQ ID NO: 104 to SEQ ID NO: 107.

[0304] In one embodiment the antigen-binding construct of the present invention has specificity for more than one antigen, for example where it is capable of binding two or more antigens selected from EGFR, IGF-1R, VEGFR2 and VEGF, for example where it is capable of binding EGFR and IGF-1R, or where it is capable of binding EGFR and VEGF, or where it is capable of binding VEGF and IGF-1R, or where it is capable of binding EGFR and VEGFR2, or where it is capable of binding IGF-1R and VEGFR2, or where it is capable of binding VEGF and VEGFR2, or where it is capable of binding EGFR, IGF-1R and VEGFR2, or where it is capable of binding VEGF, IGF-1R and VEGFR2, or where it is capable of binding EGFR, VEGF and VEGFR2, or where it is capable of binding EGFR, VEGF and IGF1R. Examples of such antigen-binding constructs include EGFR antibodies which have an epitope binding domain with a specificity for VEGFR2, for example an anti-VEGFR2 adnectin, attached to the c-terminus or the n-terminus of the heavy chain or the c-terminus or n-terminus of the light chain, for example the mAbdAb having the heavy chain sequence set out in SEQ ID NO: 136, 140 or 144 and/or the light chain sequence set out in SEQ ID NO: 138, 142 or 145.

[0305] Examples of such antigen-binding constructs include EGFR antibodies which have an epitope binding domain with a specificity for VEGF, for example an anti-VEGF dAb, attached to the c-terminus or the n-terminus of the heavy chain or the c-terminus or n-terminus of the light chain, for example the mAbdAb having the heavy chain sequence set out in SEQ ID NO: 165, 174, 176, 178, 184 or 186 and/or the light chain sequence set out in SEQ ID NO: 188 or 190.

[0306] Examples of such antigen-binding constructs include VEGF antibodies which have an epitope binding domain with a specificity for EGFR, for example an anti-EGFR dAb, attached to the c-terminus or the n-terminus of the heavy chain or the c-terminus or n-terminus of the light chain, for example the mAbdAb having the heavy chain sequence set out in SEQ ID NO: 180. Such mAbdAbs may also comprise the light chain sequence set out in SEQ ID NO: 182.

[0307] Examples of such antigen-binding constructs include IGF-1R antibodies which have an epitope binding domain with a specificity for VEGF, for example an anti-VEGF lipocalin, attached to the c-terminus or the n-terminus of the heavy chain or the c-terminus or n-terminus of the light chain, for example the mAbdAb having the heavy chain sequence set out in SEQ ID NO: 123 or 125. Such mAbdAbs may also comprise the light chain sequence set out in SEQ ID NO:113

[0308] Examples of such antigen-binding constructs include IGF-1R antibodies which have an epitope binding domain with a specificity for VEGFR2, for example an anti-VEGFR2 adnectin, attached to the c-terminus or the n-terminus of the heavy chain or the c-terminus or n-terminus of the light chain, for example the mAbdAb having the heavy chain sequence set out in SEQ ID NO: 124 or 133. Such mAbdAbs may also comprise the light chain sequence set out in SEQ ID NO: 113.

[0309] The antigen binding constructs of the invention include those which have specificity for IL-23, for example which comprises an epitope-binding domain which is capable of binding to IL-23, or which comprises a paired VH/VL which binds to IL-23.

[0310] The antigen binding construct may comprise an antibody which is capable of binding to IL-23. The antigen binding construct may comprise a dAb which is capable of binding to IL-23.

[0311] In one embodiment the antigen-binding construct of the present invention has specificity for more than one antigen, for example where it is capable of binding two or more antigens selected from TH17 type cytokines, for example. IL-17, IL-22, or IL-21, for example where it is capable of binding IL-23 and IL-17, or where it is capable of binding IL-23 and IL-21, or where it is capable of binding IL-23 and IL-22. Examples of such antigen-binding constructs include IL-23 antibodies which have an epitope binding domain with a specificity for IL-17, for example an anti-IL-17 dAb, attached to the c-terminus or the n-terminus of the heavy chain or the c-terminus or n-terminus of the light chain.

[0312] The antigen binding constructs of the invention include those which have specificity for PDGFRα, for example which comprises an epitope-binding domain which is capable of binding to PDGFRα, or which comprises a paired VH/VL which binds to PDGFRα. The antigen binding construct may comprise an antibody which is capable of binding to PDGFRα. The antigen binding construct may comprise a dAb which is capable of binding to PDGFRα.

[0313] The antigen binding constructs of the invention include those which have specificity for FGFR1, for example which comprises an epitope-binding domain which is capable of binding to FGFR1, or which comprises a paired VH/VL which binds to FGFR1. The antigen binding construct may comprise an antibody which is capable of binding to FGFR1. The antigen binding construct may comprise a dAb which is capable of binding to FGFR1.

[0314] The antigen binding constructs of the invention include those which have specificity for FGFR3, for example which comprises an epitope-binding domain which is capable of binding to FGFR3, or which comprises a paired VH/VL which binds to FGFR3. The antigen binding construct may comprise an antibody which is capable of binding to FGFR3. The antigen binding construct may comprise a dAb which is capable of binding to FGFR3.

[0315] The antigen binding constructs of the invention include those which have specificity for VEGFR2, for example which comprises an epitope-binding domain which is capable of binding to VEGFR2, or which comprises a paired VH/VL which binds to VEGFR2. The antigen binding construct may comprise an antibody which is capable of binding to VEGFR2. The antigen binding construct may comprise a dAb which is capable of binding to VEGFR2.

[0316] The antigen binding constructs of the invention include those which have specificity for VEGFR3, for example which comprises an epitope-binding domain which is capable of binding to VEGFR3, or which comprises a paired VH/VL which binds to VEGFR3. The antigen binding construct may comprise an antibody which is capable of binding to VEGFR3. The antigen binding construct may comprise a dAb which is capable of binding to VEGFR3.

[0317] The antigen binding constructs of the invention include those which have specificity for VE cadherin, for example which comprises an epitope-binding domain which is capable of binding to VE cadherin, or which comprises a paired VH/VL which binds to VE cadherin.

[0318] The antigen binding construct may comprise an antibody which is capable of binding to VE cadherin. The antigen binding construct may comprise a dAb which is capable of binding to VE cadherin.

[0319] The antigen binding constructs of the invention include those which have specificity for neuropilin, for example which comprises an epitope-binding domain which is capable of binding to neuropilin, or which comprises a paired VH/VL which binds to neuropilin. The antigen binding construct may comprise an antibody which is capable of binding to neuropilin. The antigen binding construct may comprise a dAb which is capable of binding to neuropilin.

[0320] The antigen binding constructs of the invention include those which have specificity for Flt-3, for example which comprises an epitope-binding domain which is capable of binding to Flt-3, or which comprises a paired VH/VL which binds to Flt-3.

[0321] The antigen binding construct may comprise an antibody which is capable of binding to Flt-3. The antigen binding construct may comprise a dAb which is capable of binding to Flt-3.

[0322] The antigen binding constructs of the invention include those which have specificity for ron, for example which comprises an epitope-binding domain which is capable of binding ron, or which comprises a paired VH/VL which binds to ron.

[0323] The antigen binding construct may comprise an antibody which is capable of binding to ron. The antigen binding construct may comprise a dAb which is capable of binding to ron. The antigen binding constructs of the invention include those which have specificity for Trp-1, for example which comprises an epitope-binding domain which is capable of binding Trp-1, or which comprises a paired VH/VL which binds to Trp-1. The antigen binding construct may comprise an antibody which is capable of binding to Trp-1. The antigen binding construct may comprise a dAb which is capable of binding to Trp-1.

[0324] In one embodiment the antigen-binding construct of the present invention has specificity for more than one antigen, for example where it is capable of binding two or more antigens which are implicated in cancer, for example where it is capable of binding two or more antigens selected from PDGFRα, FGFR1, FGFR3, VEGFR2, VEGFR3, IGF1R, EGFR and VEGF, VE cadherin, neuropilin, Flt-3, ron, Trp-1, CD-20 for example where it is capable of binding PDGFRα and FGFR1, or where it is capable of binding PDGFRα and VEGF, or where it is capable of binding PDGFRα and FGFR3, or where it is capable of binding PDGFRα and VEGFR2, or where it is capable of binding PDGFRα and VEGFR3, or where it is capable of binding PDGFRα and IGF1R, or where it is capable of binding PDGFRα and EGFR, or where it is capable of binding PDGFRα and VEGF, or where it is capable of binding PDGFRα and VE cadherin, or where it is capable of binding PDGFRα and neuropilin, or where it is capable of binding PDGFRα and Flt-3, or where it is capable of binding PDGFRα and ron, or where it is capable of binding PDGFRα and Trp1, or where it is capable of binding PDGFRα and CD-20, or where it is capable of binding FGFR1 and FGFR3, or where it is capable of binding FGFR1 and VEGFR2, or where it is capable of binding FGFR1 and VEGR3, or where it is capable of binding FGFR1 and IGF1R, or where it is capable of binding FGFR1 and EGFR, or where it is capable of binding FGFR1 and VEGF, or where it is capable of binding FGFR1 and VE cadherin, or where it is capable of binding FGFR1 and neuropilin, or where it is capable of binding FGFR1 and Flt-3, or where it is capable of binding FGFR1 and ron, or where it is capable of binding FGFR1 and Trp-1, or where it is capable of binding FGFR1 and CD-20, or where it is capable of binding FGFR3 and VEGFR2, or where it is capable of binding FGFR3 and VEGFR3, or where it is capable of binding FGFR3 and IGF1R, or where it is capable of binding FGFR3 and EGFR, or where it is capable of binding FGFR3 and VEGF, or where it is capable of binding FGFR3 and VE cadherin, or where it is capable of binding FGFR3 and neuropilin, or where it is capable of binding FGFR3 and Flt-3, or where it is capable of binding FGFR3 and ron, or where it is capable of binding FGFR3 and Trp-1, or where it is capable of binding FGFR3 and CD-20, or where it is capable of binding VEGFR2 and VEGFR3, or or where it is capable of binding VEGFR2 and IGF1R, or where it is capable of binding VEGFR2 and EGFR, or where it is capable of binding VEGFR2 and VEGF, or where it is capable of binding VEGFR2 and VE cadherin, or where it is capable of binding VEGFR2 and neuropilin, or where it is capable of binding VEGFR2 and Flt-3, or where it is capable of binding VEGFR2 and ron, or where it is capable of binding VEGFR2 and Trp-1, or where it is capable of binding VEGFR2 and CD-20, or where it is capable of binding VEGFR3 and IGF-1R, or where it is capable of binding VEGFR3 and EGFR, or where it is capable of binding VEGFR3 and VEGF, or where it is capable of binding VEGFR3 and VE cadherin, or where it is capable of binding VEGFR3 and neuropilin, or where it is capable of binding VEGFR3 and Flt-3, or where it is capable of binding VEGFR3 and Trp-1, or where it is capable of binding VEGFR3 and CD-20, or where it is capable of binding IGF1R and EGFR, or where it is capable of binding IGF1R and VEGF, or where it is capable of binding IGF1R and VE cadherin, or where it is capable of binding IGF1R and neuropilin, or where it is capable of binding IGF1R and Flt-3, or where it is capable of binding IGF1R and ron, or where it is capable of binding IGF1R and Trp-1, or where it is capable of binding IGF1R and CD-20, or where it is capable of binding EGFR and VEGF, or where it is capable of binding EGFR and VE cadherin, or where it is capable of binding EGFR and neuropilin, or where it is capable of binding EGFR and Flt-3, or where it is capable of binding EGFR and ron, or where it is capable of binding EGFR and Trp-1, or where it is capable of binding EGFR and CD-20, or where it is capable of binding VEGF and VE cadherin, or where it is capable of binding VEGF and neuropilin, or where it is capable of binding VEGF and Flt-3, or where it is capable of binding VEGF and ron, or where it is capable of binding VEGF and Trp-1, or where it is capable of binding VEGF and CD-20, or where it is capable of binding VE cadherin and neuropilin, or where it is capable of binding VE cadherin and Flt-3, or where it is capable of binding VE cadherin and ron, or where it is capable of binding VE cadherin and Trp-1, or where it is capable of binding VE cadherin and CD-20, or where it is capable of binding neuropilin and Flt-3, or where it is capable of binding neuropilin and ron, or where it is capable of binding neuropilin and Trp-1, or where it is capable of binding neuropilin and CD-20, or where it is capable of binding Flt-3 and ron, or where it is capable of binding Flt-3 and Trp-1, or where it is capable of binding Flt-3 and CD-20, or where it is capable of binding ron and Trp-1, or where it is capable of binding ron and CD-20, and or where it is capable of binding Trp-1 and CD-20.

[0325] Such antigen-binding constructs may also have one or more further epitope binding domains with the same or different antigen-specificity attached to the c-terminus and/or the n-terminus of the heavy chain and/or the c-terminus and/or n-terminus of the light chain.

[0326] The antigen binding constructs of the invention include those which have specificity for beta-amyloid, for example which comprise an epitope-binding domain which is capable of binding to beta-amyloid, or which comprises a paired VH/VL which binds to beta-amyloid. The antigen binding construct may comprise an antibody which is capable of binding to beta-amyloid. The antigen binding construct may comprise a dAb which is capable of binding to beta-amyloid.

[0327] The antigen binding constructs of the invention include those which have specificity for CD-3, for example which comprise an epitope-binding domain which is capable of binding to CD-3, or which comprises a paired VH/VL which binds to CD-3.

[0328] The antigen binding construct may comprise an antibody which is capable of binding to CD-3. The antigen binding construct may comprise a dAb which is capable of binding to CD-3.

[0329] The antigen binding constructs of the invention include those which have specificity for gpIIIb/IIa, for example which comprise an epitope-binding domain which is capable of binding to gpIIIb/IIa, or which comprises a paired VH/VL which binds to gpIIIb/IIa. The antigen binding construct may comprise an antibody which is capable of binding to gpIIIb/IIa. The antigen binding construct may comprise a dAb which is capable of binding to gpIIIb/IIa.

[0330] The antigen binding constructs of the invention include those which have specificity for TGFbeta, for example which comprise an epitope-binding domain which is capable of binding to TGFbeta, or which comprises a paired VH/VL which binds to TGFbeta. The antigen binding construct may comprise an antibody which is capable of binding to TGFbeta. The antigen binding construct may comprise a dAb which is capable of binding to TGFbeta.

[0331] In one embodiment of the present invention there is provided an antigen binding construct according to the invention described herein and comprising a constant region such that the antibody has reduced ADCC and/or complement activation or effector functionality. In one such embodiment the heavy chain constant region may comprise a naturally disabled constant region of IgG2 or IgG4 isotype or a mutated IgG1 constant region. Examples of suitable modifications are described in EP0307434. One example comprises the substitutions of alanine residues at positions 235 and 237 (EU index numbering).

[0332] In one embodiment the antigen-binding constructs of the present invention will retain Fc functionality for example will be capable of one or both of ADCC and CDC activity. Such antigen-binding constructs may comprise an epitope-binding domain located on the light chain, for example on the c-terminus of the light chain.

[0333] The invention also provides a method of maintaining ADCC and CDC function of antigen-binding constructs by positioning of the epitope binding domain on the light chain of the antibody in particular, by positioning the epitope binding domain on the c-terminus of the light chain. Such ADCC and CDC function can be measured by any suitable assay, for example the ADCC assay set out in Example 15.3 and the CDC assay set out in Example 15.4.

[0334] The invention also provides a method of reducing CDC function of antigen-binding constructs by positioning of the epitope binding domain on the heavy chain of the antibody, in particular, by positioning the epitope binding domain on the c-terminus of the heavy chain. Such CDC function can be measured by any suitable assay, for example the CDC assay set out in Example 15.4.

[0335] In a further embodiment the antigen-binding construct of the present invention is capable of binding two or more antigens selected from VEGF, IGF-1R and EGFR, for example it is capable of binding EGFR and VEGF, or EGFR and IGF1R, or IGF1R and VEGF, or for example it is capable of binding to TNF and IL1-R. In embodiments of the invention which comprise an IGF-1R binding site, the IGF-1R binding site of the antigen-binding construct of the invention may comprise a paired VH/VL domain in the protein scaffold, which paired VH/VL domain may comprise one or more of the CDRs selected from those set out in SEQ ID NO: 80, SEQ ID NO: 81, SEQ ID NO: 82, SEQ ID NO: 83, SEQ ID NO: 84, SEQ ID NO: 85 and SEQ ID NO: 86, for example it may comprise at least CDRH3 as set out in SEQ ID NO:80, for example it may comprise all the CDRs set out in SEQ ID NO: 80, SEQ ID NO: 81, SEQ ID NO: 82, SEQ ID NO: 83, SEQ ID NO: 85, and SEQ ID NO: 86.

[0336] In embodiments of the invention which comprise an EGFR binding site, the antigen-binding construct of the present invention may bind to an epitope comprising residues 273-501 of the mature or normal or wild type EGFR sequence, for example it may bind to an epitope comprising residues 287-302 of the mature or normal or wildtype EGFR (SEQ ID NO:103).

[0337] In one embodiment, the EGFR binding site of the antigen-binding construct of the invention may comprise a paired VH/VL domain in the protein scaffold, which paired VH/VL domain may comprise one or more of the CDRs selected from those set out in SEQ ID NO: 104, SEQ ID NO: 105, SEQ ID NO: 106, SEQ ID NO: 100, SEQ ID NO: 101, and SEQ ID NO: 102, for example, it may comprise CDRH3 as set out in SEQ ID NO: 106, or it may comprise all six CDRs set out in SEQ ID NO: 104, SEQ ID NO: 105, SEQ ID NO: 106, SEQ ID NO: 100, SEQ ID NO: 101, and SEQ ID NO: 102. Such paired VH/VL domain may further comprise additional residues, particularly in the heavy chain CDRs, and in one embodiment, CDRH1 may comprise SEQ ID NO: 104 plus up to five additional residues, for example one or more of the five additional residues which are set out in SEQ ID NO: 97, CDRH2 may comprise SEQ ID NO: 105 plus up to two additional residues, for example one or both of the two additional residues which are set out in SEQ ID NO: 98 and SEQ ID NO: 107, and CDRH3 may comprise SEQ ID NO: 106 plus up to two additional residues, for example one or both of the two additional residues which are set out in SEQ ID NO: 99. In one such embodiment, the paired VH/VL comprises one or more of the CDRs set out in SEQ ID NO: 97, SEQ ID NO: 98, SEQ ID NO: 99, SEQ ID NO: 100, SEQ ID NO: 101, and SEQ ID NO: 102, for example it may comprise at least CDRH3 as set out in SEQ ID NO:99, for example it may comprise all six CDRs set out in SEQ ID NO: 97, SEQ ID NO: 98, SEQ ID NO: 99, SEQ ID NO: 100, SEQ ID NO: 101 and SEQ ID NO: 102 (more detail of suitable antibodies can be found in WO02/092771 and WO2005/081854).

[0338] In one embodiment, the antigen binding constructs comprise an epitope-binding domain which is a domain antibody (dAb), for example the epitope binding domain may be a human VH or human VL, or a camelid V_{HH} or a shark dAb (NARV).

[0339] In one embodiment the antigen binding constructs comprise an epitope-binding domain which is a derivative of a scaffold selected from the group consisting of CTLA-4 (Evibody); lipocalin; Protein A derived molecules such as Z-domain of Protein A (Affibody, SpA), A-domain (Avimer/Maxibody); Heat shock proteins such as GroEI and GroES; transferrin (trans-body); ankyrin repeat protein (DARPin); peptide aptamer; C-type lectin domain (Tetranectin); human γ-crystallin and human ubiquitin (affilins); PDZ domains; scorpion toxinkunitz type domains of human protease inhibitors; and fibronectin (adnectin); which has been subjected to protein engineering in order to obtain binding to a ligand other than the natural ligand.

[0340] The antigen binding constructs of the present invention may comprise a protein scaffold attached to an epitope binding domain which is an adnectin, for example an IgG scaffold with an adnectin attached to the c-terminus of the heavy chain, or it may comprise a protein scaffold attached to an adnectin, for example an IgG scaffold with an adnectin attached to the n-terminus of the heavy chain, or it may comprise a protein scaffold attached to an adnectin, for example an IgG scaffold with an adnectin attached to the c-terminus of the light chain, or it may comprise a protein scaffold attached to an adnectin, for example an IgG scaffold with an adnectin attached to the n-terminus of the light chain. In other embodiments it may comprise a protein scaffold, for example an IgG scaffold, attached to an epitope binding domain which is CTLA-4, for example an IgG scaffold with CTLA-4 attached to the n-terminus of the heavy chain, or it may comprise for example an IgG scaffold with CTLA-4 attached to the c-terminus of the heavy chain, or it may comprise for example an IgG scaffold with CTLA-4 attached to the n-terminus of the light chain, or it may comprise an IgG scaffold with CTLA-4 attached to the c-terminus of the light chain.

[0341] In other embodiments it may comprise a protein scaffold, for example an IgG scaffold, attached to an epitope binding domain which is a lipocalin, for example an IgG scaffold with a lipocalin attached to the n-terminus of the heavy chain, or it may comprise for example an IgG scaffold with a lipocalin attached to the c-terminus of the heavy chain, or it may comprise for example an IgG scaffold with a lipocalin attached to the n-terminus of the light chain, or it may comprise an IgG scaffold with a lipocalin attached to the c-terminus of the light chain.

[0342] In other embodiments it may comprise a protein scaffold, for example an IgG scaffold, attached to an epitope binding domain which is an SpA, for example an IgG scaffold with an SpA attached to the n-terminus of the heavy chain, or it may comprise for example an IgG scaffold with an SpA attached to the c-terminus of the heavy chain, or it may comprise for example an IgG scaffold with an SpA attached to the n-terminus of the light chain, or it may comprise an IgG scaffold with an SpA attached to the c-terminus of the light chain.

[0343] In other embodiments it may comprise a protein scaffold, for example an IgG scaffold, attached to an epitope binding domain which is an affibody, for example an IgG scaffold with an affibody attached to the n-terminus of the heavy chain, or it may comprise for example an IgG scaffold with an affibody attached to the c-terminus of the heavy chain, or it may comprise for example an IgG scaffold with an affibody attached to the n-terminus of the light chain, or it may comprise an IgG scaffold with an affibody attached to the c-terminus of the light chain.

[0344] In other embodiments it may comprise a protein scaffold, for example an IgG scaffold, attached to an epitope binding domain which is an affimer, for example an IgG scaffold with an affimer attached to the n-terminus of the heavy chain, or it may comprise for example an IgG scaffold with an affimer attached to the c-terminus of the heavy chain, or it may comprise for example an IgG scaffold with an affimer attached to the n-terminus of the light chain, or it may comprise an IgG scaffold with an affimer attached to the c-terminus of the light chain.

[0345] In other embodiments it may comprise a protein scaffold, for example an IgG scaffold, attached to an epitope binding domain which is a GroEI, for example an IgG scaffold with a GroEI attached to the n-terminus of the heavy chain, or it may comprise for example an IgG scaffold with a GroEI attached to the c-terminus of the heavy chain, or it may comprise for example an IgG scaffold with a GroEI attached to the n-terminus of the light chain, or it may comprise an IgG scaffold with a GroEI attached to the c-terminus of the light chain.

[0346] In other embodiments it may comprise a protein scaffold, for example an IgG scaffold, attached to an epitope binding domain which is a transferrin, for example an IgG scaffold with a transferrin attached to the n-terminus of the heavy chain, or it may comprise for example an IgG scaffold with a transferrin attached to the c-terminus of the heavy chain, or it may comprise for example an IgG scaffold with a transferrin attached to the n-terminus of the light chain, or it may comprise an IgG scaffold with a transferrin attached to the c-terminus of the light chain.

[0347] In other embodiments it may comprise a protein scaffold, for example an IgG scaffold, attached to an epitope binding domain which is a GroES, for example an IgG scaffold with a GroES attached to the n-terminus of the heavy chain, or it may comprise for example an IgG scaffold with a GroES attached to the c-terminus of the heavy chain, or it may comprise for example an IgG scaffold with a GroES attached to the n-terminus of the light chain, or it may comprise an IgG scaffold with a GroES attached to the c-terminus of the light chain.

[0348] In other embodiments it may comprise a protein scaffold, for example an IgG scaffold, attached to an epitope binding domain which is a DARPin, for example an IgG scaffold with a DARPin attached to the n-terminus of the heavy chain, or it may comprise for example an IgG scaffold with a DARPin attached to the c-terminus of the heavy chain, or it may comprise for example an IgG scaffold with a DARPin attached to the n-terminus of the light chain, or it may comprise an IgG scaffold with a DARPin attached to the c-terminus of the light chain.

[0349] In other embodiments it may comprise a protein scaffold, for example an IgG scaffold, attached to an epitope binding domain which is a peptide aptamer, for example an IgG scaffold with a peptide aptamer attached to the n-terminus of the heavy chain, or it may comprise for example an IgG scaffold with a peptide aptamer attached to the c-terminus of the heavy chain, or it may comprise for example an IgG scaffold with a peptide aptamer attached to the n-terminus of the light chain, or it may comprise an IgG scaffold with a peptide aptamer attached to the c-terminus of the light chain.

[0350] In one embodiment of the present invention there are four epitope binding domains, for example four domain antibodies, two of the epitope binding domains may have specificity for the same antigen, or all of the epitope binding domains present in the antigen-binding construct may have specificity for the same antigen.

[0351] Protein scaffolds of the present invention may be linked to epitope-binding domains by the use of linkers. Examples of suitable linkers include amino acid sequences which may be from 1 amino acid to 150 amino acids in length, or from 1 amino acid to 140 amino acids, for example, from 1 amino acid to 130 amino acids, or from 1 to 120 amino acids, or from 1 to 80 amino acids, or from 1 to 50 amino acids, or from 1 to 20 amino acids, or from 1 to 10 amino acids, or from 5 to 18 amino acids. Such sequences may have their own tertiary structure, for example, a linker of the present invention may comprise a single variable domain. The size of a linker in one embodiment is equivalent to a single variable domain. Suitable linkers may be of a size from 1 to 20 angstroms, for example less than 15 angstroms, or less than 10 angstroms, or less than 5 angstroms.

[0352] In one embodiment of the present invention at least one of the epitope binding domains is directly attached to the Ig scaffold with a linker comprising from 1 to 150 amino acids, for example 1 to 20 amino acids, for example 1 to 10 amino acids. Such linkers may be selected from any one of those set out in SEQ ID NO: 6 to 11, ‘STG’ (serine, threonine, glycine), ‘GSTG’ or ‘RS’, for example the linker may be ‘TVAAPS’, or the linker may be ‘GGGGS’. Linkers of use in the antigen binding constructs of the present invention may comprise alone or in addition to other linkers, one or more sets of GS residues, for example ‘GSTVAAPS’ or ‘TVAAPSGS’ or ‘GSTVAAPSGS’. In another embodiment there is no linker between the epitope binding domain, for example the dAb, and the Ig scaffold. In another embodiment the epitope binding domain, for example a dAb, is linked to the Ig scaffold by the linker ‘TVAAPS’. In another embodiment the epitope binding domain, for example a dAb, is linked to the Ig scaffold by the linker ‘TVAAPSGS’. In another embodiment the epitope binding domain, for example a dAb, is linked to the Ig scaffold by the linker ‘GS’.

[0353] In one embodiment, the antigen-binding construct of the present invention comprises at least one epitope binding domain which is capable of binding human serum albumin.

[0354] In one embodiment, there are at least 3 antigen binding sites, for example there are 4, or 5 or 6 or 8 or 10 antigen binding sites and the antigen binding construct is capable of binding at least 3 or 4 or 5 or 6 or 8 or 10 antigens, for example it is capable of binding 3 or 4 or 5 or 6 or 8 or 10 antigens simultaneously.

[0355] The invention also provides the antigen-binding constructs for use in medicine, for example for use in the manufacture of a medicament for treating cancer or inflammatory diseases such as asthma, rheumatoid arthritis, or osteoarthritis.

[0356] The invention provides a method of treating a patient suffering from cancer or inflammatory diseases such as asthma, rheumatoid arthritis, or osteoarthritis, comprising administering a therapeutic amount of an antigen-binding construct of the invention.

[0357] The antigen-binding constructs of the invention may be used for the treatment of cancer or inflammatory diseases such as asthma, rheumatoid arthritis, or osteoarthritis.

[0358] The antigen-binding constructs of the invention may have some effector function. For example if the protein scaffold contains an Fc region derived from an antibody with effector function, for example if the protein scaffold comprises CH2 and CH3 from IgG1. Levels of effector function can be varied according to known techniques, for example by mutations in the CH2 domain, for example wherein the IgG1 CH2 domain has one or more mutations at positions selected from 239 and 332 and 330, for example the mutations are selected from S239D and 1332E and A330L such that the antibody has enhanced effector function, and/or for example altering the glycosylation profile of the antigen-binding construct of the invention such that there is a reduction in fucosylation of the Fc region.

[0359] Protein scaffolds of use in the present invention include full monoclonal antibody scaffolds comprising all the domains of an antibody, or protein scaffolds of the present invention may comprise a non-conventional antibody structure, such as a monovalent antibody. Such monovalent antibodies may comprise a paired heavy and light chain wherein the hinge region of the heavy chain is modified so that the heavy chain does not homodimerise, such as the monovalent antibody described in WO2007059782. Other monovalent antibodies may comprise a paired heavy and light chain which dimerises with a second heavy chain which is lacking a functional variable region and CH1 region, wherein the first and second heavy chains are modified so that they will form heterodimers rather than homodimers, resulting in a monovalent antibody with two heavy chains and one light chain such as the monovalent antibody described in WO2006015371. Such monovalent antibodies can provide the protein scaffold of the present invention to which epitope binding domains can be linked, for example such as the antigen binding constructs describe in Example 32.

[0360] Epitope-binding domains of use in the present invention are domains that specifically bind an antigen or epitope independently of a different V region or domain, this may be a domain antibody or may be a domain which is a derivative of a scaffold selected from the group consisting of CTLA-4 (Evibody); lipocalin; Protein A derived molecules such as Z-domain of Protein A (Affibody, SpA), A-domain (Avimer/Maxibody); Heat shock proteins such as GroEI and GroES; transferrin (trans-body); ankyrin repeat protein (DARPin); peptide aptamer; C-type lectin domain (Tetranectin); human γ-crystallin and human ubiquitin (affilins); PDZ domains; scorpion toxinkunitz type domains of human protease inhibitors; and fibronectin (adnectin); which has been subjected to protein engineering in order to obtain binding to a ligand other than the natural ligand. In one embodiment this may be an domain antibody or other suitable domains such as a domain selected from the group consisting of CTLA-4, lipocallin, SpA, an Affibody, an avimer, GroEI, transferrin, GroES and fibronectin. In one embodiment this may be selected from a dAb, an Affibody, an ankyrin repeat protein (DARPin) and an adnectin. In another embodiment this may be selected from an Affibody, an ankyrin repeat protein (DARPin) and an adnectin. In another embodiment this may be a domain antibody, for example a domain antibody selected from a human, camelid or shark (NARV) domain antibody.

[0361] Epitope-binding domains can be linked to the protein scaffold at one or more positions. These positions include the C-terminus and the N-terminus of the protein scaffold, for example at the C-terminus of the heavy chain and/or the C-terminus of the light chain of an IgG, or for example the N-terminus of the heavy chain and/or the N-terminus of the light chain of an IgG.

[0362] In one embodiment, a first epitope binding domain is linked to the protein scaffold and a second epitope binding domain is linked to the first epitope binding domain, for example where the protein scaffold is an IgG scaffold, a first epitope binding domain may be linked to the c-terminus of the heavy chain of the IgG scaffold, and that epitope binding domain can be linked at its c-terminus to a second epitope binding domain, or for example a first epitope binding domain may be linked to the c-terminus of the light chain of the IgG scaffold, and that first epitope binding domain may be further linked at its c-terminus to a second epitope binding domain, or for example a first epitope binding domain may be linked to the n-terminus of the light chain of the IgG scaffold, and that first epitope binding domain may be further linked at its n-terminus to a second epitope binding domain, or for example a first epitope binding domain may be linked to the n-terminus of the heavy chain of the IgG scaffold, and that first epitope binding domain may be further linked at its n-terminus to a second epitope binding domain. Examples of such antigen binding constructs are described in Example 31.

[0363] When the epitope-binding domain is a domain antibody, some domain antibodies may be suited to particular positions within the scaffold.

[0364] Domain antibodies of use in the present invention can be linked at the C-terminal end of the heavy chain and/or the light chain of conventional IgGs. In addition some dAbs can be linked to the C-terminal ends of both the heavy chain and the light chain of conventional antibodies.

[0365] In constructs where the N-terminus of dAbs are fused to an antibody constant domain (either C_{H}3 or CL), a peptide linker may help the dAb to bind to antigen. Indeed, the N-terminal end of a dAb is located closely to the complementarity-determining regions (CDRS) involved in antigen-binding activity. Thus a short peptide linker acts as a spacer between the epitope-binding, and the constant domain fo the protein scaffold, which may allow the dAb CDRs to more easily reach the antigen, which may therefore bind with high affinity.

[0366] The surroundings in which dAbs are linked to the IgG will differ depending on which antibody chain they are fused to:

[0367] When fused at the C-terminal end of the antibody light chain of an IgG scaffold, each dAb is expected to be located in the vicinity of the antibody hinge and the Fc portion. It is likely that such dAbs will be located far apart from each other. In conventional antibodies, the angle between Fab fragments and the angle between each Fab fragment and the Fc portion can vary quite significantly. It is likely that—with mAbdAbs—the angle between the Fab fragments will not be widely different, whilst some angular restrictions may be observed with the angle between each Fab fragment and the Fc portion.

[0368] When fused at the C-terminal end of the antibody heavy chain of an IgG scaffold, each dAb is expected to be located in the vicinity of the C_{H}3 domains of the Fc portion. This is not expected to impact on the Fc binding properties to Fc receptors (e.g. FcγRI, II, III an FcRn) as these receptors engage with the C_{H}2 domains (for the FcγRI, II and III class of receptors) or with the hinge between the C_{H}2 and C_{H}3 domains (e.g. FcRn receptor). Another feature of such antigen-binding constructs is that both dAbs are expected to be spatially close to each other and provided that flexibility is provided by provision of appropriate linkers, these dAbs may even form homodimeric species, hence propagating the ‘zipped’ quaternary structure of the Fc portion, which may enhance stability of the construct.

[0369] Such structural considerations can aid in the choice of the most suitable position to link an epitope-binding domain, for example a dAb, on to a protein scaffold, for example an antibody.

[0370] The size of the antigen, its localization (in blood or on cell surface), its quaternary structure (monomeric or multimeric) can vary. Conventional antibodies are naturally designed to function as adaptor constructs due to the presence of the hinge region, wherein the orientation of the two antigen-binding sites at the tip of the Fab fragments can vary widely and hence adapt to the molecular feature of the antigen and its surroundings. In contrast dAbs linked to an antibody or other protein scaffold, for example a protein scaffold which comprises an antibody with no hinge region, may have less structural flexibility either directly or indirectly.

[0371] Understanding the solution state and mode of binding at the dAb is also helpful. Evidence has accumulated that in vitro dAbs can predominantly exist in monomeric, homo-dimeric or multimeric forms in solution (Reiter et al. (1999) J Mol Biol 290 p 685-698; Ewert et al (2003) J Mol Biol 325, p 531-553, Jespers et al (2004) J Mol Biol 337 p 893-903; Jespers et al (2004) Nat Biotechnol 22 p 1161-1165; Martin et al (1997) Protein Eng. 10 p 607-614; Sepulvada et al (2003) J Mol Biol 333 p 355-365). This is fairly reminiscent to multimerisation events observed in vivo with Ig domains such as Bence-Jones proteins (which are dimers of immunoglobulin light chains (Epp et al (1975) Biochemistry 14 p 4943-4952; Huan et al (1994) Biochemistry 33 p 14848-14857; Huang et al (1997) Mol immunol 34 p 1291-1301) and amyloid fibers (James et al. (2007) J Mol Biol. 367:603-8).

[0372] For example, it may be desirable to link domain antibodies that tend to dimerise in solution to the C-terminal end of the Fc portion in preference to the C-terminal end of the light chain as linking to the C-terminal end of the Fc will allow those dAbs to dimerise in the context of the antigen-binding construct of the invention.

[0373] The antigen-binding constructs of the present invention may comprise antigen-binding sites specific for a single antigen, or may have antigen-binding sites specific for two or more antigens, or for two or more epitopes on a single antigen, or there may be antigen-binding sites each of which is specific for a different epitope on the same or different antigens.

[0374] The antigen-binding sites can each have binding specificity for an antigen, such as human or animal proteins, including cytokines, growth factors, cytokine receptors, growth factor receptors, enzymes (e.g., proteases), co-factors for enzymes, DNA binding proteins, lipids and carbohydrates. Suitable targets, including cytokines, growth factors, cytokine receptors, growth factor receptors and other proteins include but are not limited to: ApoE, Apo-SAA, BDNF, Cardiotrophin-1, CEA, CD40, CD40 Ligand, CD56, CD38, CD138, EGF, EGF receptor, ENA-78, Eotaxin, Eotaxin-2, Exodus-2, FAPα, FGF-acidic, FGF-basic, fibroblast growth factor-10, FLT3 ligand, Fractalkine (CX3C), GDNF, G-CSF, GM-CSF, GF-β1, human serum albumin, insulin, IFN-γ, IGF-1, IGF-II, IL-1α, IL-1β, IL-1 receptor, IL-1 receptor type 1, IL-2, IL-3, IL-4, IL-5, IL-6, IL-7, IL-8 (72 a.a.), IL-8 (77 a.a.), IL-9, IL-10, IL-11, IL-12, IL-13, IL-15, IL-16, IL-17, IL-18 (IGIF), Inhibin α, Inhibin β, IP-10, keratinocyte growth factor-2 (KGF-2), KGF, Leptin, LIF, Lymphotactin, Mullerian inhibitory substance, monocyte colony inhibitory factor, monocyte attractant protein, M-CSF, c-fms, v-fmsMDC (67 a.a.), MDC (69 a.a.), MCP-1 (MCAF), MCP-2, MCP-3, MCP-4, MDC (67 a.a.), MDC (69 a.a.), MIG, MIP-1α, MIP-1β, MIP-3α, MIP-3β, MIP-4, myeloid progenitor inhibitor factor-1 (MPIF-1), NAP-2, Neurturin, Nerve growth factor, β-NGF, NT-3, NT-4, Oncostatin M, PDGF-AA, PDGF-AB, PDGF-BB, PF-4, RANTES, SDF1α, SDF1β, SCF, SCGF, stem cell factor (SCF), TARC, TGF-α, TGF-β, TGF-β2, TGF-β3, tumour necrosis factor (TNF), TNF-α, TNF-β, TNF receptor 1, TNF receptor II, TNIL-1, TPO, VEGF, VEGF A, VEGF B, VEGF C, VEGF D, VEGF receptor 1, VEGF receptor 2, VEGF receptor 3, GCP-2, GRO/MGSA, GRO-β, GRO-γ, HCC1, 1-309, HER 1, HER 2, HER 3, HER 4, serum albumin, vWF, amyloid proteins (e.g., amyloid alpha), MMP12, PDK1, IgE, and other targets disclosed herein. It will be appreciated that this list is by no means exhaustive. In some embodiments, the protease resistant peptide or polypeptide binds a target in pulmonary tissue, such as a target selected from the group consisting of TNFR1, IL-1, IL-1R, IL-4, IL-4R, IL-5, IL-6, IL-6R, IL-8, IL-8R, IL-9, IL-9R, IL-10, IL-12 IL-12R, IL-13, IL-13Rα1, IL-13Rα2, IL-15, IL-15R, IL-16, IL-17R, IL-17, IL-18, IL-18R, IL-23 IL-23R, IL-25, CD2, CD4, CD11a, CD23, CD25, CD27, CD28, CD30, CD40, CD40L, CD56, CD138, ALK5, EGFR, FcER1, TGFb, CCL2, CCL18, CEA, CR8, CTGF, CXCL12 (SDF-1), chymase, FGF, Furin, Endothelin-1, Eotaxins (e.g., Eotaxin, Eotaxin-2, Eotaxin-3), GM-CSF, ICAM-1, ICOS, IgE, IFNa, 1-309, integrins, L-selectin, MIF, MIP4, MDC, MCP-1, MMPs, neutrophil elastase, osteopontin, OX-40, PARC, PD-1, RANTES, SCF, SDF-1, siglec8, TARC, TGFb, Thrombin, Tim-1, TNF, TRANCE, Tryptase, VEGF, VLA-4, VCAM, α4β7, CCR2, CCR3, CCR4, CCR5, CCR7, CCR8, alphavbeta6, alphavbeta8, cMET, CD8, vWF, amyloid proteins (e.g., amyloid alpha), MMP12, PDK1, and IgE.

[0375] In particular, the antigen-binding constructs of the present invention may be useful in treating diseases associated with IL-13, IL-5 and IL-4, for example atopic dermatitis, allergic rhinitis, crohn's disease, COPD, fibrotic diseases or disorders such as idiopathic pulmonary fibrosis, progressive systemic sclerosis, hepatic fibrosis, hepatic granulomas, schistosomiasis, leishmaniasis, diseases of cell cycle regulation such as Hodgkins disease, B cell chronic lymphocytic leukaemia, for example the constructs may be useful in treating asthma.

[0376] Antigen-binding constructs of the present invention may be useful in treating diseases associated with growth factors such as IGF-1R, VEGF, and EGFR, for example cancer or rheumatoid arthritis, examples of types of cancer in which such therapies may be useful are breast cancer, prostrate cancer, lung cancer and myeloma.

[0377] Antigen-binding constructs of the present invention may be useful in treating diseases associated with TNF, for example arthritis, for example rheumatoid arthritis or osteoarthritis.

[0378] Antigen-binding constructs of the present invention may be useful in treating diseases associated with IL1-R, for example arthritis, for example rheumatoid arthritis or osteoarthritis.

[0379] Antigen-binding constructs of the present invention may be useful in treating diseases associated with CD-20, for example autoimmune diseases such as psoriasis, inflammatory bowel disease, ulcerative colitis, crohns disease, rheumatoid arthritis, juvenile rheumatoid arthritis, systemic lupus erythematosus, neurodegenerative diseases, for example multiple sclerosis, neutrophil driven diseases, for example COPD, Wegeners vasculitis, cystic fibrosis, Sjogrens syndrome, chronic transplant rejection, type 1 diabetes graft versus host disease, asthma, allergic diseases atoptic dermatitis, eczematous dermatitis, allergic rhinitis, autoimmune diseases other including thyroiditis, spondyloarthropathy, ankylosing spondylitis, uveitis, polychonritis or scleroderma, or cancer e.g. B-cell lymphomas or mature B cell neoplasm such as CLL or SLL.

[0380] Antigen-binding constructs of the present invention may be useful in treating diseases associated with IL-17 and IL-23, for example psoriasis, inflammatory bowel disease, ulcerative colitis, crohns disease, rheumatoid arthritis, juvenile rheumatoid arthritis, systemic lupus erythematosus, neurodegenerative diseases, for example multiple sclerosis, neutrophil driven diseases, for example COPD, Wegeners vasculitis, cystic fibrosis, Sjogrens syndrome, chronic transplant rejection, type 1 diabetes graft versus host disease, asthma, allergic diseases atoptic dermatitis, eczematous dermatitis, allergic rhinitis, autoimmune diseases other including thyroiditis, spondyloarthropathy, ankylosing spondylitis, uveitis, polychonritis or scleroderma.

[0381] The antigen binding constructs of the present invention may be produced by transfection of a host cell with an expression vector comprising the coding sequence for the antigen binding construct of the invention. An expression vector or recombinant plasmid is produced by placing these coding sequences for the antigen binding construct in operative association with conventional regulatory control sequences capable of controlling the replication and expression in, and/or secretion from, a host cell. Regulatory sequences include promoter sequences, e.g., CMV promoter, and signal sequences which can be derived from other known antibodies. Similarly, a second expression vector can be produced having a DNA sequence which encodes a complementary antigen binding construct light or heavy chain. In certain embodiments this second expression vector is identical to the first except insofar as the coding sequences and selectable markers are concerned, so to ensure as far as possible that each polypeptide chain is functionally expressed. Alternatively, the heavy and light chain coding sequences for the antigen binding construct may reside on a single vector, for example in two expression cassettes in the same vector.

[0382] A selected host cell is co-transfected by conventional techniques with both the first and second vectors (or simply transfected by a single vector) to create the transfected host cell of the invention comprising both the recombinant or synthetic light and heavy chains. The transfected cell is then cultured by conventional techniques to produce the engineered antigen binding construct of the invention. The antigen binding construct which includes the association of both the recombinant heavy chain and/or light chain is screened from culture by appropriate assay, such as ELISA or RIA. Similar conventional techniques may be employed to construct other antigen binding constructs.

[0383] Suitable vectors for the cloning and subcloning steps employed in the methods and construction of the compositions of this invention may be selected by one of skill in the art. For example, the conventional pUC series of cloning vectors may be used. One vector, pUC19, is commercially available from supply houses, such as Amersham (Buckinghamshire, United Kingdom) or Pharmacia (Uppsala, Sweden). Additionally, any vector which is capable of replicating readily, has an abundance of cloning sites and selectable genes (e.g., antibiotic resistance), and is easily manipulated may be used for cloning. Thus, the selection of the cloning vector is not a limiting factor in this invention. The expression vectors may also be characterized by genes suitable for amplifying expression of the heterologous DNA sequences, e.g., the mammalian dihydrofolate reductase gene (DHFR). Other preferable vector sequences include a poly A signal sequence, such as from bovine growth hormone (BGH) and the betaglobin promoter sequence (betaglopro). The expression vectors useful herein may be synthesized by techniques well known to those skilled in this art.

[0384] The components of such vectors, e.g. replicons, selection genes, enhancers, promoters, signal sequences and the like, may be obtained from commercial or natural sources or synthesized by known procedures for use in directing the expression and/or secretion of the product of the recombinant DNA in a selected host. Other appropriate expression vectors of which numerous types are known in the art for mammalian, bacterial, insect, yeast, and fungal expression may also be selected for this purpose.

[0385] The present invention also encompasses a cell line transfected with a recombinant plasmid containing the coding sequences of the antigen binding constructs of the present invention. Host cells useful for the cloning and other manipulations of these cloning vectors are also conventional. However, cells from various strains of E. coli may be used for replication of the cloning vectors and other steps in the construction of antigen binding constructs of this invention.

[0386] Suitable host cells or cell lines for the expression of the antigen binding constructs of the invention include mammalian cells such as NSO, Sp2/0, CHO (e.g. DG44), COS, HEK, a fibroblast cell (e.g., 3T3), and myeloma cells, for example it may be expressed in a CHO or a myeloma cell. Human cells may be used, thus enabling the molecule to be modified with human glycosylation patterns. Alternatively, other eukaryotic cell lines may be employed. The selection of suitable mammalian host cells and methods for transformation, culture, amplification, screening and product production and purification are known in the art. See, e.g., Sambrook et al., cited above.

[0387] Bacterial cells may prove useful as host cells suitable for the expression of the recombinant Fabs or other embodiments of the present invention (see, e.g., Plückthun, A., Immunol. Rev., 130:151-188 (1992)). However, due to the tendency of proteins expressed in bacterial cells to be in an unfolded or improperly folded form or in a non-glycosylated form, any recombinant Fab produced in a bacterial cell would have to be screened for retention of antigen binding ability. If the molecule expressed by the bacterial cell was produced in a properly folded form, that bacterial cell would be a desirable host, or in alternative embodiments the molecule may express in the bacterial host and then be subsequently re-folded. For example, various strains of E. coli used for expression are well-known as host cells in the field of biotechnology. Various strains of B. subtilis, Streptomyces, other bacilli and the like may also be employed in this method. Where desired, strains of yeast cells known to those skilled in the art are also available as host cells, as well as insect cells, e.g. Drosophila and Lepidoptera and viral expression systems. See, e.g. Miller et al., Genetic Engineering, 8:277-298, Plenum Press (1986) and references cited therein.

[0388] The general methods by which the vectors may be constructed, the transfection methods required to produce the host cells of the invention, and culture methods necessary to produce the antigen binding construct of the invention from such host cell may all be conventional techniques. Typically, the culture method of the present invention is a serum-free culture method, usually by culturing cells serum-free in suspension. Likewise, once produced, the antigen binding constructs of the invention may be purified from the cell culture contents according to standard procedures of the art, including ammonium sulfate precipitation, affinity columns, column chromatography, gel electrophoresis and the like. Such techniques are within the skill of the art and do not limit this invention. For example, preparation of altered antibodies are described in WO 99/58679 and WO 96/16990. Yet another method of expression of the antigen binding constructs may utilize expression in a transgenic animal, such as described in U.S. Pat. No. 4,873,316. This relates to an expression system using the animal's casein promoter which when transgenically incorporated into a mammal permits the female to produce the desired recombinant protein in its milk.

[0389] In a further aspect of the invention there is provided a method of producing an antibody of the invention which method comprises the step of culturing a host cell transformed or transfected with a vector encoding the light and/or heavy chain of the antibody of the invention and recovering the antibody thereby produced.

[0390] In accordance with the present invention there is provided a method of producing an antigen binding construct of the present invention which method comprises the steps of;
[0391] (a) providing a first vector encoding a heavy chain of the antigen binding construct;
[0392] (b) providing a second vector encoding a light chain of the antigen binding construct;
[0393] (c) transforming a mammalian host cell (e.g. CHO) with said first and second vectors;
[0394] (d) culturing the host cell of step (c) under conditions conducive to the secretion of the antigen binding construct from said host cell into said culture media;
[0395] (e) recovering the secreted antigen binding construct of step (d).

[0396] Once expressed by the desired method, the antigen binding construct is then examined for in vitro activity by use of an appropriate assay. Presently conventional ELISA assay formats are employed to assess qualitative and quantitative binding of the antigen binding construct to its target. Additionally, other in vitro assays may also be used to verify neutralizing efficacy prior to subsequent human clinical studies performed to evaluate the persistence of the antigen binding construct in the body despite the usual clearance mechanisms.

[0397] The dose and duration of treatment relates to the relative duration of the molecules of the present invention in the human circulation, and can be adjusted by one of skill in the art depending upon the condition being treated and the general health of the patient. It is envisaged that repeated dosing (e.g. once a week or once every two weeks) over an extended time period (e.g. four to six months) maybe required to achieve maximal therapeutic efficacy.

[0398] The mode of administration of the therapeutic agent of the invention may be any suitable route which delivers the agent to the host. The antigen binding constructs, and pharmaceutical compositions of the invention are particularly useful for parenteral administration, i.e., subcutaneously (s.c.), intrathecally, intraperitoneally, intramuscularly (i.m.), intravenously (i.v.), or intranasally.

[0399] Therapeutic agents of the invention may be prepared as pharmaceutical compositions containing an effective amount of the antigen binding construct of the invention as an active ingredient in a pharmaceutically acceptable carrier. In the prophylactic agent of the invention, an aqueous suspension or solution containing the antigen binding construct, preferably buffered at physiological pH, in a form ready for injection is preferred. The compositions for parenteral administration will commonly comprise a solution of the antigen binding construct of the invention or a cocktail thereof dissolved in a pharmaceutically acceptable carrier, preferably an aqueous carrier. A variety of aqueous carriers may be employed, e.g., 0.9% saline, 0.3% glycine, and the like. These solutions may be made sterile and generally free of particulate matter. These solutions may be sterilized by conventional, well known sterilization techniques (e.g., filtration). The compositions may contain pharmaceutically acceptable auxiliary substances as required to approximate physiological conditions such as pH adjusting and buffering agents, etc. The concentration of the antigen binding construct of the invention in such pharmaceutical formulation can vary widely, i.e., from less than about 0.5%, usually at or at least about 1% to as much as 15 or 20% by weight and will be selected primarily based on fluid volumes, viscosities, etc., according to the particular mode of administration selected.

[0400] Thus, a pharmaceutical composition of the invention for intramuscular injection could be prepared to contain 1 mL sterile buffered water, and between about 1 ng to about 100 mg, e.g. about 50 ng to about 30 mg or more preferably, about 5 mg to about 25 mg, of an antigen binding construct of the invention. Similarly, a pharmaceutical composition of the invention for intravenous infusion could be made up to contain about 250 ml of sterile Ringer's solution, and about 1 to about 30 and preferably 5 mg to about 25 mg of an antigen binding construct of the invention per ml of Ringer's solution. Actual methods for preparing parenterally administrable compositions are well known or will be apparent to those skilled in the art and are described in more detail in, for example, Remington's Pharmaceutical Science, 15th ed., Mack Publishing Company, Easton, Pa. For the preparation of intravenously administrable antigen binding construct formulations of the invention see Lasmar U and Parkins D “The formulation of Biopharmaceutical products”, Pharma. Sci. Tech. today, page 129-137, Vol. 3 (3 Apr. 2000), Wang, W “Instability, stabilisation and formulation of liquid protein pharmaceuticals”, Int. J. Pharm 185 (1999) 129-188, Stability of Protein Pharmaceuticals Part A and B ed Ahern T. J., Manning M. C., New York, N.Y.: Plenum Press (1992), Akers, M. J. “Excipient-Drug interactions in Parenteral Formulations”, J. Pharm Sci 91 (2002) 2283-2300, Imamura, K et al “Effects of types of sugar on stabilization of Protein in the dried state”, J Pharm Sci 92 (2003) 266-274, Izutsu, Kkojima, S. “Excipient crystallinity and its protein-structure-stabilizing effect during freeze-drying”, J. Pharm. Pharmacol, 54 (2002) 1033-1039, Johnson, R, “Mannitol-sucrose mixtures-versatile formulations for protein lyophilization”, J. Pharm. Sci, 91 (2002) 914-922.

[0401] Ha, E Wang W, Wang Y. j. “Peroxide formation in polysorbate 80 and protein stability”, J. Pharm Sci, 91, 2252-2264, (2002) the entire contents of which are incorporated herein by reference and to which the reader is specifically referred.

[0402] It is preferred that the therapeutic agent of the invention, when in a pharmaceutical preparation, be present in unit dose forms. The appropriate therapeutically effective dose will be determined readily by those of skill in the art. Suitable doses may be calculated for patients according to their weight, for example suitable doses may be in the range of 0.01 to 20 mg/kg, for example 0.1 to 20 mg/kg, for example 1 to 20 mg/kg, for example 10 to 20 mg/kg or for example 1 to 15 mg/kg, for example 10 to 15 mg/kg. To effectively treat conditions of use in the present invention in a human, suitable doses may be within the range of 0.01 to 1000 mg, for example 0.1 to 1000 mg, for example 0.1 to 500 mg, for example 500 mg, for example 0.1 to 100 mg, or 0.1 to 80 mg, or 0.1 to 60 mg, or 0.1 to 40 mg, or for example 1 to 100 mg, or 1 to 50 mg, of an antigen binding construct of this invention, which may be administered parenterally, for example subcutaneously, intravenously or intramuscularly. Such dose may, if necessary, be repeated at appropriate time intervals selected as appropriate by a physician.

[0403] The antigen binding constructs described herein can be lyophilized for storage and reconstituted in a suitable carrier prior to use. This technique has been shown to be effective with conventional immunoglobulins and art-known lyophilization and reconstitution techniques can be employed.

[0404] There are several methods known in the art which can be used to find epitope-binding domains of use in the present invention.

[0405] The term “library” refers to a mixture of heterogeneous polypeptides or nucleic acids. The library is composed of members, each of which has a single polypeptide or nucleic acid sequence. To this extent, “library” is synonymous with “repertoire.” Sequence differences between library members are responsible for the diversity present in the library. The library may take the form of a simple mixture of polypeptides or nucleic acids, or may be in the form of organisms or cells, for example bacteria, viruses, animal or plant cells and the like, transformed with a library of nucleic acids. In one example, each individual organism or cell contains only one or a limited number of library members. Advantageously, the nucleic acids are incorporated into expression vectors, in order to allow expression of the polypeptides encoded by the nucleic acids. In a one aspect, therefore, a library may take the form of a population of host organisms, each organism containing one or more copies of an expression vector containing a single member of the library in nucleic acid form which can be expressed to produce its corresponding polypeptide member. Thus, the population of host organisms has the potential to encode a large repertoire of diverse polypeptides.

[0406] A “universal framework” is a single antibody framework sequence corresponding to the regions of an antibody conserved in sequence as defined by Kabat (“Sequences of Proteins of Immunological Interest”, US Department of Health and Human Services) or corresponding to the human germline immunoglobulin repertoire or structure as defined by Chothia and Lesk, (1987) J. Mol. Biol. 196:910-917. There may be a single framework, or a set of such frameworks, which has been found to permit the derivation of virtually any binding specificity though variation in the hypervariable regions alone.

[0407] Amino acid and nucleotide sequence alignments and homology, similarity or identity, as defined herein are in one embodiment prepared and determined using the algorithm BLAST 2 Sequences, using default parameters (Tatusova, T. A. et al., FEMS Microbiol Lett, 174:187-188 (1999)).

[0408] The epitope binding domain(s) and antigen binding sites can each have binding specificity for a generic ligand or any desired target ligand, such as human or animal proteins, including cytokines, growth factors, cytokine receptors, growth factor receptors, enzymes (e.g., proteases), co-factors for enzymes, DNA binding proteins, lipids and carbohydrates. Suitable targets, including cytokines, growth factors, cytokine receptors, growth factor receptors and other proteins include but are not limited to: ApoE, Apo-SAA, BDNF, Cardiotrophin-1, CEA, CD40, CD40 Ligand, CD56, CD38, CD138, EGF, EGF receptor, ENA-78, Eotaxin, Eotaxin-2, Exodus-2, FAPα, FGF-acidic, FGF-basic, fibroblast growth factor-10, FLT3 ligand, Fractalkine (CX3C), GDNF, G-CSF, GM-CSF, GF-β1, human serum albumin, insulin, IFN-γ, IGF-1, IGF-II, IL-1α, IL-1β, IL-1 receptor, IL-1 receptortype 1, IL-2, IL-3, IL-4, IL-5, IL-6, IL-7, IL-8 (72 a.a.), IL-8 (77 a.a.), IL-9, IL-10, IL-11, IL-12, IL-13, IL-15, IL-16, IL-17, IL-18 (IGIF), Inhibin α, Inhibin β, IP-10, keratinocyte growth factor-2 (KGF-2), KGF, Leptin, LIF, Lymphotactin, Mullerian inhibitory substance, monocyte colony inhibitory factor, monocyte attractant protein, M-CSF, c-fms, v-fmsMDC (67 a.a.), MDC (69 a.a.), MCP-1 (MCAF), MCP-2, MCP-3, MCP-4, MDC (67 a.a.), MDC (69 a.a.), MIG, MIP-1α, MIP-1β, MIP-3α, MIP-3β, MIP-4, myeloid progenitor inhibitor factor-1 (MPIF-1), NAP-2, Neurturin, Nerve growth factor, β-NGF, NT-3, NT-4, Oncostatin M, PDGF-AA, PDGF-AB, PDGF-BB, PF-4, RANTES, SDF1α, SDF1β, SCF, SCGF, stem cell factor (SCF), TARC, TGF-α, TGF-β, TGF-β2, TGF-β3, tumour necrosis factor (TNF), TNF-α, TNF-β, TNF receptor 1, TNF receptor II, TNIL-1, TPO, VEGF, VEGF A, VEGF B, VEGF C, VEGF D, VEGF receptor 1, VEGF receptor 2, VEGF receptor 3, GCP-2, GRO/MGSA, GRO-β, GRO-γ, HCC1, 1-309, HER 1, HER 2, HER 3, HER 4, serum albumin, vWF, amyloid proteins (e.g., amyloid alpha), MMP12, PDK1, IgE, and other targets disclosed herein. It will be appreciated that this list is by no means exhaustive.

[0409] In some embodiments, binding is to a target in pulmonary tissue, such as a target selected from the group consisting of TNFR1, IL-1, IL-1R, IL-4, IL-4R, IL-5, IL-6, IL-6R, IL-8, IL-8R, IL-9, IL-9R, IL-10, IL-12 IL-12R, IL-13, IL-13Rα1, IL-13Rα2, IL-15, IL-15R, IL-16, IL-17R, IL-17, IL-18, IL-18R, IL-23 IL-23R, IL-25, CD2, CD4, CD11a, CD23, CD25, CD27, CD28, CD30, CD40, CD40L, CD56, CD138, ALK5, EGFR, FcER1, TGFb, CCL2, CCL18, CEA, CR8, CTGF, CXCL12 (SDF-1), chymase, FGF, Furin, Endothelin-1, Eotaxins (e.g., Eotaxin, Eotaxin-2, Eotaxin-3), GM-CSF, ICAM-1, ICOS, IgE, IFNa, 1-309, integrins, L-selectin, MIF, MIP4, MDC, MCP-1, MMPs, neutrophil elastase, osteopontin, OX-40, PARC, PD-1, RANTES, SCF, SDF-1, siglec8, TARC, TGFb, Thrombin, Tim-1, TNF, TRANCE, Tryptase, VEGF, VLA-4, VCAM, α4β7, CCR2, CCR3, CCR4, CCR5, CCR7, CCR8, alphavbeta6, alphavbeta8, cMET, CD8, vWF, amyloid proteins (e.g., amyloid alpha), MMP12, PDK1, and IgE.

[0410] When a display system (e.g., a display system that links coding function of a nucleic acid and functional characteristics of the peptide or polypeptide encoded by the nucleic acid) is used in the methods described herein, eg in the selection of a dAb or other epitope binding domain, it is frequently advantageous to amplify or increase the copy number of the nucleic acids that encode the selected peptides or polypeptides. This provides an efficient way of obtaining sufficient quantities of nucleic acids and/or peptides or polypeptides for additional rounds of selection, using the methods described herein or other suitable methods, or for preparing additional repertoires (e.g., affinity maturation repertoires). Thus, in some embodiments, the methods of selecting epitope binding domains comprises using a display system (e.g., that links coding function of a nucleic acid and functional characteristics of the peptide or polypeptide encoded by the nucleic acid, such as phage display) and further comprises amplifying or increasing the copy number of a nucleic acid that encodes a selected peptide or polypeptide. Nucleic acids can be amplified using any suitable methods, such as by phage amplification, cell growth or polymerase chain reaction.

[0411] In one example, the methods employ a display system that links the coding function of a nucleic acid and physical, chemical and/or functional characteristics of the polypeptide encoded by the nucleic acid. Such a display system can comprise a plurality of replicable genetic packages, such as bacteriophage or cells (bacteria). The display system may comprise a library, such as a bacteriophage display library. Bacteriophage display is an example of a display system.

[0412] A number of suitable bacteriophage display systems (e.g., monovalent display and multivalent display systems) have been described. (See, e.g., Griffiths et al., U.S. Pat. No. 6,555,313 B1 (incorporated herein by reference); Johnson et al., U.S. Pat. No. 5,733,743 (incorporated herein by reference); McCafferty et al., U.S. Pat. No. 5,969,108 (incorporated herein by reference); Mulligan-Kehoe, U.S. Pat. No. 5,702,892 (Incorporated herein by reference); Winter, G. et al., Annu. Rev. Immunol. 12:433-455 (1994); Soumillion, P. et al., Appl. Biochem. Biotechnol. 47(2-3):175-189 (1994); Castagnoli, L. et al., Comb. Chem. High Throughput Screen, 4(2):121-133 (2001).) The peptides or polypeptides displayed in a bacteriophage display system can be displayed on any suitable bacteriophage, such as a filamentous phage (e.g., fd, M13, F1), a lytic phage (e.g., T4, T7, lambda), or an RNA phage (e.g., MS2), for example.

[0413] Generally, a library of phage that displays a repertoire of peptides or phagepolypeptides, as fusion proteins with a suitable phage coat protein (e.g., fd pill protein), is produced or provided. The fusion protein can display the peptides or polypeptides at the tip of the phage coat protein, or if desired at an internal position. For example, the displayed peptide or polypeptide can be present at a position that is amino-terminal to domain 1 of pill. (Domain 1 of pill is also referred to as N1.) The displayed polypeptide can be directly fused to pill (e.g., the N-terminus of domain 1 of pill) or fused to pill using a linker. If desired, the fusion can further comprise a tag (e.g., myc epitope, His tag). Libraries that comprise a repertoire of peptides or polypeptides that are displayed as fusion proteins with a phage coat protein, can be produced using any suitable methods, such as by introducing a library of phage vectors or phagemid vectors encoding the displayed peptides or polypeptides into suitable host bacteria, and culturing the resulting bacteria to produce phage (e.g., using a suitable helper phage or complementing plasmid if desired). The library of phage can be recovered from the culture using any suitable method, such as precipitation and centrifugation.

[0414] The display system can comprise a repertoire of peptides or polypeptides that contains any desired amount of diversity. For example, the repertoire can contain peptides or polypeptides that have amino acid sequences that correspond to naturally occurring polypeptides expressed by an organism, group of organisms, desired tissue or desired cell type, or can contain peptides or polypeptides that have random or randomized amino acid sequences. If desired, the polypeptides can share a common core or scaffold. For example, all polypeptides in the repertoire or library can be based on a scaffold selected from protein A, protein L, protein G, a fibronectin domain, an anticalin, CTLA4, a desired enzyme (e.g., a polymerase, a cellulase), or a polypeptide from the immunoglobulin superfamily, such as an antibody or antibody fragment (e.g., an antibody variable domain). The polypeptides in such a repertoire or library can comprise defined regions of random or randomized amino acid sequence and regions of common amino acid sequence. In certain embodiments, all or substantially all polypeptides in a repertoire are of a desired type, such as a desired enzyme (e.g., a polymerase) or a desired antigen-binding fragment of an antibody (e.g., human V_{H} or human V_{L}). In some embodiments, the polypeptide display system comprises a repertoire of polypeptides wherein each polypeptide comprises an antibody variable domain. For example, each polypeptide in the repertoire can contain a V_{H}, a V_{L} or an Fv (e.g., a single chain Fv).

[0415] Amino acid sequence diversity can be introduced into any desired region of a peptide or polypeptide or scaffold using any suitable method. For example, amino acid sequence diversity can be introduced into a target region, such as a complementarity determining region of an antibody variable domain or a hydrophobic domain, by preparing a library of nucleic acids that encode the diversified polypeptides using any suitable mutagenesis methods (e.g., low fidelity PCR, oligonucleotide-mediated or site directed mutagenesis, diversification using NNK codons) or any other suitable method. If desired, a region of a polypeptide to be diversified can be randomized.

[0416] The size of the polypeptides that make up the repertoire is largely a matter of choice and uniform polypeptide size is not required. The polypeptides in the repertoire may have at least tertiary structure (form at least one domain).

### Selection/Isolation/Recovery

[0417] An epitope binding domain or population of domains can be selected, isolated and/or recovered from a repertoire or library (e.g., in a display system) using any suitable method. For example, a domain is selected or isolated based on a selectable characteristic (e.g., physical characteristic, chemical characteristic, functional characteristic). Suitable selectable functional characteristics include biological activities of the peptides or polypeptides in the repertoire, for example, binding to a generic ligand (e.g., a superantigen), binding to a target ligand (e.g., an antigen, an epitope, a substrate), binding to an antibody (e.g., through an epitope expressed on a peptide or polypeptide), and catalytic activity. (See, e.g., Tomlinson et al., WO 99/20749; WO 01/57065; WO 99/58655.)

[0418] In some embodiments, the protease resistant peptide or polypeptide is selected and/or isolated from a library or repertoire of peptides or polypeptides in which substantially all domains share a common selectable feature. For example, the domain can be selected from a library or repertoire in which substantially all domains bind a common generic ligand, bind a common target ligand, bind (or are bound by) a common antibody, or possess a common catalytic activity. This type of selection is particularly useful for preparing a repertoire of domains that are based on a parental peptide or polypeptide that has a desired biological activity, for example, when performing affinity maturation of an immunoglobulin single variable domain.

[0419] Selection based on binding to a common generic ligand can yield a collection or population of domains that contain all or substantially all of the domains that were components of the original library or repertoire. For example, domains that bind a target ligand or a generic ligand, such as protein A, protein L or an antibody, can be selected, isolated and/or recovered by panning or using a suitable affinity matrix. Panning can be accomplished by adding a solution of ligand (e.g., generic ligand, target ligand) to a suitable vessel (e.g., tube, petri dish) and allowing the ligand to become deposited or coated onto the walls of the vessel. Excess ligand can be washed away and domains can be added to the vessel and the vessel maintained under conditions suitable for peptides or polypeptides to bind the immobilized ligand. Unbound domains can be washed away and bound domains can be recovered using any suitable method, such as scraping or lowering the pH, for example.

[0420] Suitable ligand affinity matrices generally contain a solid support or bead (e.g., agarose) to which a ligand is covalently or noncovalently attached. The affinity matrix can be combined with peptides or polypeptides (e.g., a repertoire that has been incubated with protease) using a batch process, a column process or any other suitable process under conditions suitable for binding of domains to the ligand on the matrix. domains that do not bind the affinity matrix can be washed away and bound domains can be eluted and recovered using any suitable method, such as elution with a lower pH buffer, with a mild denaturing agent (e.g., urea), or with a peptide or domain that competes for binding to the ligand. In one example, a biotinylated target ligand is combined with a repertoire under conditions suitable for domains in the repertoire to bind the target ligand. Bound domains are recovered using immobilized avidin or streptavidin (e.g., on a bead).

[0421] In some embodiments, the generic or target ligand is an antibody or antigen binding fragment thereof. Antibodies or antigen binding fragments that bind structural features of peptides or polypeptides that are substantially conserved in the peptides or polypeptides of a library or repertoire are particularly useful as generic ligands. Antibodies and antigen binding fragments suitable for use as ligands for isolating, selecting and/or recovering protease resistant peptides or polypeptides can be monoclonal or polyclonal and can be prepared using any suitable method.

### Libraries/Repertoires

[0422] Libraries that encode and/or contain protease epitope binding domains can be prepared or obtained using any suitable method. A library can be designed to encode domains based on a domain or scaffold of interest (e.g., a domain selected from a library) or can be selected from another library using the methods described herein. For example, a library enriched in domains can be prepared using a suitable polypeptide display system. Libraries that encode a repertoire of a desired type of domain can readily be produced using any suitable method. For example, a nucleic acid sequence that encodes a desired type of polypeptide (e.g., an immunoglobulin variable domain) can be obtained and a collection of nucleic acids that each contain one or more mutations can be prepared, for example by amplifying the nucleic acid using an error-prone polymerase chain reaction (PCR) system, by chemical mutagenesis (Deng et al., J. Biol. Chem., 269:9533 (1994)) or using bacterial mutator strains (Low et al., J. Mol. Biol., 260:359 (1996)). In other embodiments, particular regions of the nucleic acid can be targeted for diversification. Methods for mutating selected positions are also well known in the art and include, for example, the use of mismatched oligonucleotides or degenerate oligonucleotides, with or without the use of PCR. For example, synthetic antibody libraries have been created by targeting mutations to the antigen binding loops. Random or semi-random antibody H3 and L3 regions have been appended to germline immunoblulin V gene segments to produce large libraries with unmutated framework regions (Hoogenboom and Winter (1992) supra; Nissim et al. (1994) supra; Griffiths et al. (1994) supra; DeKruif et al. (1995) supra). Such diversification has been extended to include some or all of the other antigen binding loops (Crameri et al. (1996) Nature Med., 2:100; Riechmann et al. (1995) Bio/Technology, 13:475; Morphosys, WO 97/08320, supra). In other embodiments, particular regions of the nucleic acid can be targeted for diversification by, for example, a two-step PCR strategy employing the product of the first PCR as a “mega-primer.” (See, e.g., Landt, O. et al., Gene 96:125-128 (1990).) Targeted diversification can also be accomplished, for example, by SOE PCR. (See, e.g., Horton, R. M. et al., Gene 77:61-68 (1989).)

[0423] Sequence diversity at selected positions can be achieved by altering the coding sequence which specifies the sequence of the polypeptide such that a number of possible amino acids (e.g., all 20 or a subset thereof) can be incorporated at that position. Using the IUPAC nomenclature, the most versatile codon is NNK, which encodes all amino acids as well as the TAG stop codon. The NNK codon may be used in order to introduce the required diversity. Other codons which achieve the same ends are also of use, including the NNN codon, which leads to the production of the additional stop codons TGA and TAA. Such a targeted approach can allow the full sequence space in a target area to be explored.

[0424] Some libraries comprise domains that are members of the immunoglobulin superfamily (e.g., antibodies or portions thereof). For example the libraries can comprise domains that have a known main-chain conformation. (See, e.g., Tomlinson et al., WO 99/20749.) Libraries can be prepared in a suitable plasmid or vector. As used herein, vector refers to a discrete element that is used to introduce heterologous DNA into cells for the expression and/or replication thereof. Any suitable vector can be used, including plasmids (e.g., bacterial plasmids), viral or bacteriophage vectors, artificial chromosomes and episomal vectors. Such vectors may be used for simple cloning and mutagenesis, or an expression vector can be used to drive expression of the library. Vectors and plasmids usually contain one or more cloning sites (e.g., a polylinker), an origin of replication and at least one selectable marker gene. Expression vectors can further contain elements to drive transcription and translation of a polypeptide, such as an enhancer element, promoter, transcription termination signal, signal sequences, and the like. These elements can be arranged in such a way as to be operably linked to a cloned insert encoding a polypeptide, such that the polypeptide is expressed and produced when such an expression vector is maintained under conditions suitable for expression (e.g., in a suitable host cell). Cloning and expression vectors generally contain nucleic acid sequences that enable the vector to replicate in one or more selected host cells. Typically in cloning vectors, this sequence is one that enables the vector to replicate independently of the host chromosomal DNA and includes origins of replication or autonomously replicating sequences. Such sequences are well known for a variety of bacteria, yeast and viruses. The origin of replication from the plasmid pBR322 is suitable for most Gram-negative bacteria, the 2 micron plasmid origin is suitable for yeast, and various viral origins (e.g. SV40, adenovirus) are useful for cloning vectors in mammalian cells. Generally, the origin of replication is not needed for mammalian expression vectors, unless these are used in mammalian cells able to replicate high levels of DNA, such as COS cells. Cloning or expression vectors can contain a selection gene also referred to as selectable marker. Such marker genes encode a protein necessary for the survival or growth of transformed host cells grown in a selective culture medium. Host cells not transformed with the vector containing the selection gene will therefore not survive in the culture medium. Typical selection genes encode proteins that confer resistance to antibiotics and other toxins, e.g. ampicillin, neomycin, methotrexate or tetracycline, complement auxotrophic deficiencies, or supply critical nutrients not available in the growth media. Suitable expression vectors can contain a number of components, for example, an origin of replication, a selectable marker gene, one or more expression control elements, such as a transcription control element (e.g., promoter, enhancer, terminator) and/or one or more translation signals, a signal sequence or leader sequence, and the like. Expression control elements and a signal or leader sequence, if present, can be provided by the vector or other source. For example, the transcriptional and/or translational control sequences of a cloned nucleic acid encoding an antibody chain can be used to direct expression.

[0425] A promoter can be provided for expression in a desired host cell. Promoters can be constitutive or inducible. For example, a promoter can be operably linked to a nucleic acid encoding an antibody, antibody chain or portion thereof, such that it directs transcription of the nucleic acid. A variety of suitable promoters for procaryotic (e.g., the β-lactamase and lactose promoter systems, alkaline phosphatase, the tryptophan (trp) promoter system, lac, tac, T3, T7 promoters for E. coli) and eucaryotic (e.g., simian virus 40 early or late promoter, Rous sarcoma virus long terminal repeat promoter, cytomegalovirus promoter, adenovirus late promoter, EG-1a promoter) hosts are available.

[0426] In addition, expression vectors typically comprise a selectable marker for selection of host cells carrying the vector, and, in the case of a replicable expression vector, an origin of replication. Genes encoding products which confer antibiotic or drug resistance are common selectable markers and may be used in procaryotic (e.g., β-lactamase gene (ampicillin resistance), Tet gene for tetracycline resistance) and eucaryotic cells (e.g., neomycin (G418 or geneticin), gpt (mycophenolic acid), ampicillin, or hygromycin resistance genes). Dihydrofolate reductase marker genes permit selection with methotrexate in a variety of hosts. Genes encoding the gene product of auxotrophic markers of the host (e.g., LEU2, URA3, HIS3) are often used as selectable markers in yeast. Use of viral (e.g., baculovirus) or phage vectors, and vectors which are capable of integrating into the genome of the host cell, such as retroviral vectors, are also contemplated.

[0427] Suitable expression vectors for expression in prokaryotic (e.g., bacterial cells such as E. coli) or mammalian cells include, for example, a pET vector (e.g., pET-12a, pET-36, pET-37, pET-39, pET-40, Novagen and others), a phage vector (e.g., pCANTAB 5 E, Pharmacia), pRIT2T (Protein A fusion vector, Pharmacia), pCDM8, pcDNA1.1/amp, pcDNA3.1, pRc/RSV, pEF-1 (Invitrogen, Carlsbad, Calif.), pCMV-SCRIPT, pFB, pSG5, pXT1 (Stratagene, La Jolla, Calif.), pCDEF3 (Goldman, L. A., et al., Biotechniques, 21:1013-1015 (1996)), pSVSPORT (GibcoBRL, Rockville, Md.), pEF-Bos (Mizushima, S., et al., Nucleic Acids Res., 18:5322 (1990)) and the like. Expression vectors which are suitable for use in various expression hosts, such as prokaryotic cells (E. coli), insect cells (Drosophila Schnieder S2 cells, Sf9), yeast (P. methanolica, P. pastoris, S. cerevisiae) and mammalian cells (eg, COS cells) are available.

[0428] Some examples of vectors are expression vectors that enable the expression of a nucleotide sequence corresponding to a polypeptide library member. Thus, selection with generic and/or target ligands can be performed by separate propagation and expression of a single clone expressing the polypeptide library member. As described above, a particular selection display system is bacteriophage display. Thus, phage or phagemid vectors may be used, for example vectors may be phagemid vectors which have an E. coli. origin of replication (for double stranded replication) and also a phage origin of replication (for production of single-stranded DNA). The manipulation and expression of such vectors is well known in the art (Hoogenboom and Winter (1992) supra; Nissim et al., (1994) supra). Briefly, the vector can contain a β-lactamase gene to confer selectivity on the phagemid and a lac promoter upstream of an expression cassette that can contain a suitable leader sequence, a multiple cloning site, one or more peptide tags, one or more TAG stop codons and the phage protein pill. Thus, using various suppressor and non-suppressor strains of E. coli and with the addition of glucose, iso-propyl thio-β-D-galactoside (IPTG) or a helper phage, such as VCS M13, the vector is able to replicate as a plasmid with no expression, produce large quantities of the polypeptide library member only or product phage, some of which contain at least one copy of the polypeptide-pll fusion on their surface.

[0429] Antibody variable domains may comprise a target ligand binding site and/or a generic ligand binding site. In certain embodiments, the generic ligand binding site is a binding site for a superantigen, such as protein A, protein L or protein G. The variable domains can be based on any desired variable domain, for example a human VH (e.g., V_{H} 1a, V_{H} 1b, V_{H} 2, V_{H} 3, V_{H} 4, V_{H} 5, V_{H} 6), a human Vλ (e.g., VλI, VλII, VλIII, VλIV, VλV, VλVI or Vκ1) or a human VK (e.g., Vκ2, Vκ3, Vκ4, Vκ5, Vκ6, Vκ7, Vκ8, Vκ9 or Vκ10).

[0430] A still further category of techniques involves the selection of repertoires in artificial compartments, which allow the linkage of a gene with its gene product. For example, a selection system in which nucleic acids encoding desirable gene products may be selected in microcapsules formed by water-in-oil emulsions is described in WO99/02671, WO00/40712 and Tawfik & Griffiths (1998) Nature Biotechnol 16(7), 652-6. Genetic elements encoding a gene product having a desired activity are compartmentalised into microcapsules and then transcribed and/or translated to produce their respective gene products (RNA or protein) within the microcapsules. Genetic elements which produce gene product having desired activity are subsequently sorted. This approach selects gene products of interest by detecting the desired activity by a variety of means.

### Characterisation of the Epitope Binding Domains.

[0431] The binding of a domain to its specific antigen or epitope can be tested by methods which will be familiar to those skilled in the art and include ELISA. In one example, binding is tested using monoclonal phage ELISA.

[0432] Phage ELISA may be performed according to any suitable procedure: an exemplary protocol is set forth below.

[0433] Populations of phage produced at each round of selection can be screened for binding by ELISA to the selected antigen or epitope, to identify “polyclonal” phage antibodies. Phage from single infected bacterial colonies from these populations can then be screened by ELISA to identify “monoclonal” phage antibodies. It is also desirable to screen soluble antibody fragments for binding to antigen or epitope, and this can also be undertaken by ELISA using reagents, for example, against a C- or N-terminal tag (see for example Winter et al. (1994) Ann. Rev. Immunology 12, 433-55 and references cited therein.

[0434] The diversity of the selected phage monoclonal antibodies may also be assessed by gel electrophoresis of PCR products (Marks et al. 1991, supra; Nissim et al. 1994 supra), probing (Tomlinson et al., 1992) J. Mol. Biol. 227, 776) or by sequencing of the vector DNA.

E. Structure of dAbs

[0435] In the case that the dAbs are selected from V-gene repertoires selected for instance using phage display technology as herein described, then these variable domains comprise a universal framework region, such that is they may be recognised by a specific generic ligand as herein defined. The use of universal frameworks, generic ligands and the like is described in WO99/20749.

[0436] Where V-gene repertoires are used variation in polypeptide sequence may be located within the structural loops of the variable domains. The polypeptide sequences of either variable domain may be altered by DNA shuffling or by mutation in order to enhance the interaction of each variable domain with its complementary pair. DNA shuffling is known in the art and taught, for example, by Stemmer, 1994, Nature 370: 389-391 and U.S. Pat. No. 6,297,053, both of which are incorporated herein by reference. Other methods of mutagenesis are well known to those of skill in the art.

Scaffolds for Use in Constructing dAbs
i. Selection of the Main-Chain Conformation

[0437] The members of the immunoglobulin superfamily all share a similar fold for their polypeptide chain. For example, although antibodies are highly diverse in terms of their primary sequence, comparison of sequences and crystallographic structures has revealed that, contrary to expectation, five of the six antigen binding loops of antibodies (H1, H2, L1, L2, L3) adopt a limited number of main-chain conformations, or canonical structures (Chothia and Lesk (1987) J. Mol. Biol., 196: 901; Chothia et al. (1989) Nature, 342: 877). Analysis of loop lengths and key residues has therefore enabled prediction of the main-chain conformations of H1, H2, L1, L2 and L3 found in the majority of human antibodies (Chothia et al. (1992) J. Mol. Biol., 227: 799; Tomlinson et al. (1995) EMBO J., 14: 4628; Williams et al. (1996) J. Mol. Biol., 264: 220). Although the H3 region is much more diverse in terms of sequence, length and structure (due to the use of D segments), it also forms a limited number of main-chain conformations for short loop lengths which depend on the length and the presence of particular residues, or types of residue, at key positions in the loop and the antibody framework (Martin et al. (1996) J. Mol. Biol., 263: 800; Shirai et al. (1996) FEBS Letters, 399: 1).

[0438] The dAbs are advantageously assembled from libraries of domains, such as libraries of V_{H} domains and/or libraries of V_{L} domains. In one aspect, libraries of domains are designed in which certain loop lengths and key residues have been chosen to ensure that the main-chain conformation of the members is known. Advantageously, these are real conformations of immunoglobulin superfamily molecules found in nature, to minimise the chances that they are non-functional, as discussed above. Germline V gene segments serve as one suitable basic framework for constructing antibody or T-cell receptor libraries; other sequences are also of use. Variations may occur at a low frequency, such that a small number of functional members may possess an altered main-chain conformation, which does not affect its function.

[0439] Canonical structure theory is also of use to assess the number of different main-chain conformations encoded by ligands, to predict the main-chain conformation based on ligand sequences and to chose residues for diversification which do not affect the canonical structure. It is known that, in the human V_{κ} domain, the L1 loop can adopt one of four canonical structures, the L2 loop has a single canonical structure and that 90% of human V_{κ} domains adopt one of four or five canonical structures for the L3 loop (Tomlinson et al. (1995) supra); thus, in the V_{κ} domain alone, different canonical structures can combine to create a range of different main-chain conformations. Given that the Vλ domain encodes a different range of canonical structures for the L1, L2 and L3 loops and that V_{κ} and Vλ domains can pair with any V_{H} domain which can encode several canonical structures for the H1 and H2 loops, the number of canonical structure combinations observed for these five loops is very large. This implies that the generation of diversity in the main-chain conformation may be essential for the production of a wide range of binding specificities. However, by constructing an antibody library based on a single known main-chain conformation it has been found, contrary to expectation, that diversity in the main-chain conformation is not required to generate sufficient diversity to target substantially all antigens. Even more surprisingly, the single main-chain conformation need not be a consensus structure—a single naturally occurring conformation can be used as the basis for an entire library. Thus, in a one particular aspect, the dAbs possess a single known main-chain conformation.

[0440] The single main-chain conformation that is chosen may be commonplace among molecules of the immunoglobulin superfamily type in question. A conformation is commonplace when a significant number of naturally occurring molecules are observed to adopt it. Accordingly, in one aspect, the natural occurrence of the different main-chain conformations for each binding loop of an immunoglobulin domain are considered separately and then a naturally occurring variable domain is chosen which possesses the desired combination of main-chain conformations for the different loops. If none is available, the nearest equivalent may be chosen. The desired combination of main-chain conformations for the different loops may be created by selecting germline gene segments which encode the desired main-chain conformations. In one example, the selected germline gene segments are frequently expressed in nature, and in particular they may be the most frequently expressed of all natural germline gene segments.

[0441] In designing libraries the incidence of the different main-chain conformations for each of the six antigen binding loops may be considered separately. For H1, H2, L1, L2 and L3, a given conformation that is adopted by between 20% and 100% of the antigen binding loops of naturally occurring molecules is chosen. Typically, its observed incidence is above 35% (i.e. between 35% and 100%) and, ideally, above 50% or even above 65%. Since the vast majority of H3 loops do not have canonical structures, it is preferable to select a main-chain conformation which is commonplace among those loops which do display canonical structures. For each of the loops, the conformation which is observed most often in the natural repertoire is therefore selected. In human antibodies, the most popular canonical structures (CS) for each loop are as follows: H1-CS 1 (79% of the expressed repertoire), H2-CS 3 (46%), L1-CS 2 of V_{κ} (39%), L2-CS 1 (100%), L3-CS 1 of V_{κ} (36%) (calculation assumes a κ:λ ratio of 70:30, Hood et al. (1967) Cold Spring Harbor Symp. Quant. Biol., 48: 133). For H3 loops that have canonical structures, a CDR3 length (Kabat et al. (1991) Sequences of proteins of immunological interest, U.S. Department of Health and Human Services) of seven residues with a salt-bridge from residue 94 to residue 101 appears to be the most common. There are at least 16 human antibody sequences in the EMBL data library with the required H3 length and key residues to form this conformation and at least two crystallographic structures in the protein data bank which can be used as a basis for antibody modelling (2cgr and 1tet). The most frequently expressed germline gene segments that this combination of canonical structures are the V_{H} segment 3-23 (DP-47), the J_{H} segment JH4b, the V_{κ} segment O2/O12 (DPK9) and the J_{κ} segment J_{κ}1. V_{H} segments DP45 and DP38 are also suitable. These segments can therefore be used in combination as a basis to construct a library with the desired single main-chain conformation.

[0442] Alternatively, instead of choosing the single main-chain conformation based on the natural occurrence of the different main-chain conformations for each of the binding loops in isolation, the natural occurrence of combinations of main-chain conformations is used as the basis for choosing the single main-chain conformation. In the case of antibodies, for example, the natural occurrence of canonical structure combinations for any two, three, four, five, or for all six of the antigen binding loops can be determined. Here, the chosen conformation may be commonplace in naturally occurring antibodies and may be observed most frequently in the natural repertoire. Thus, in human antibodies, for example, when natural combinations of the five antigen binding loops, H1, H2, L1, L2 and L3, are considered, the most frequent combination of canonical structures is determined and then combined with the most popular conformation for the H3 loop, as a basis for choosing the single main-chain conformation.

### Diversification of the Canonical Sequence

[0443] Having selected several known main-chain conformations or a single known main-chain conformation, dAbs can be constructed by varying the binding site of the molecule in order to generate a repertoire with structural and/or functional diversity. This means that variants are generated such that they possess sufficient diversity in their structure and/or in their function so that they are capable of providing a range of activities.

[0444] The desired diversity is typically generated by varying the selected molecule at one or more positions. The positions to be changed can be chosen at random or they may be selected. The variation can then be achieved either by randomisation, during which the resident amino acid is replaced by any amino acid or analogue thereof, natural or synthetic, producing a very large number of variants or by replacing the resident amino acid with one or more of a defined subset of amino acids, producing a more limited number of variants.

[0445] Various methods have been reported for introducing such diversity. Error-prone PCR (Hawkins et al. (1992) J. Mol. Biol., 226: 889), chemical mutagenesis (Deng et al. (1994) J. Biol. Chem., 269: 9533) or bacterial mutator strains (Low et al. (1996) J. Mol. Biol., 260: 359) can be used to introduce random mutations into the genes that encode the molecule. Methods for mutating selected positions are also well known in the art and include the use of mismatched oligonucleotides or degenerate oligonucleotides, with or without the use of PCR. For example, several synthetic antibody libraries have been created by targeting mutations to the antigen binding loops. The H3 region of a human tetanus toxoid-binding Fab has been randomised to create a range of new binding specificities (Barbas et al. (1992) Proc. Natl. Acad. Sci. USA, 89: 4457). Random or semi-random H3 and L3 regions have been appended to germline V gene segments to produce large libraries with unmutated framework regions (Hoogenboom & Winter (1992) J. Mol. Biol., 227: 381; Barbas et al. (1992) Proc. Natl. Acad. Sci. USA, 89: 4457; Nissim et al. (1994) EMBO J., 13: 692; Griffiths et al. (1994) EMBO J., 13: 3245; De Kruif et al. (1995) J. Mol. Biol., 248: 97). Such diversification has been extended to include some or all of the other antigen binding loops (Crameri et al. (1996) Nature Med., 2: 100; Riechmann et al. (1995) Bio/Technology, 13: 475; Morphosys, WO97/08320, supra).

[0446] Since loop randomisation has the potential to create approximately more than 1015 structures for H3 alone and a similarly large number of variants for the other five loops, it is not feasible using current transformation technology or even by using cell free systems to produce a library representing all possible combinations. For example, in one of the largest libraries constructed to date, 6×10¹⁰ different antibodies, which is only a fraction of the potential diversity for a library of this design, were generated (Griffiths et al. (1994) supra).

[0447] In a one embodiment, only those residues which are directly involved in creating or modifying the desired function of the molecule are diversified. For many molecules, the function will be to bind a target and therefore diversity should be concentrated in the target binding site, while avoiding changing residues which are crucial to the overall packing of the molecule or to maintaining the chosen main-chain conformation.

[0448] In one aspect, libraries of dAbs are used in which only those residues in the antigen binding site are varied. These residues are extremely diverse in the human antibody repertoire and are known to make contacts in high-resolution antibody/antigen complexes. For example, in L2 it is known that positions 50 and 53 are diverse in naturally occurring antibodies and are observed to make contact with the antigen. In contrast, the conventional approach would have been to diversify all the residues in the corresponding Complementarity Determining Region (CDR1) as defined by Kabat et al. (1991, supra), some seven residues compared to the two diversified in the library. This represents a significant improvement in terms of the functional diversity required to create a range of antigen binding specificities.

[0449] In nature, antibody diversity is the result of two processes: somatic recombination of germline V, D and J gene segments to create a naive primary repertoire (so called germline and junctional diversity) and somatic hypermutation of the resulting rearranged V genes. Analysis of human antibody sequences has shown that diversity in the primary repertoire is focused at the centre of the antigen binding site whereas somatic hypermutation spreads diversity to regions at the periphery of the antigen binding site that are highly conserved in the primary repertoire (see Tomlinson et al. (1996) J. Mol. Biol., 256: 813). This complementarity has probably evolved as an efficient strategy for searching sequence space and, although apparently unique to antibodies, it can easily be applied to other polypeptide repertoires. The residues which are varied are a subset of those that form the binding site for the target. Different (including overlapping) subsets of residues in the target binding site are diversified at different stages during selection, if desired.

[0450] In the case of an antibody repertoire, an initial ‘naive’ repertoire is created where some, but not all, of the residues in the antigen binding site are diversified. As used herein in this context, the term “naive” or “dummy” refers to antibody molecules that have no pre-determined target. These molecules resemble those which are encoded by the immunoglobulin genes of an individual who has not undergone immune diversification, as is the case with fetal and newborn individuals, whose immune systems have not yet been challenged by a wide variety of antigenic stimuli. This repertoire is then selected against a range of antigens or epitopes. If required, further diversity can then be introduced outside the region diversified in the initial repertoire. This matured repertoire can be selected for modified function, specificity or affinity.

[0451] It will be understood that the sequences described herein include sequences which are substantially identical, for example sequences which are at least 90% identical, for example which are at least 91%, or at least 92%, or at least 93%, or at least 94% or at least 95%, or at least 96%, or at least 97% or at least 98%, or at least 99% identical to the sequences described herein.

[0452] For nucleic acids, the term “substantial identity” indicates that two nucleic acids, or designated sequences thereof, when optimally aligned and compared, are identical, with appropriate nucleotide insertions or deletions, in at least about 80% of the nucleotides, usually at least about 90% to 95%, and more preferably at least about 98% to 99.5% of the nucleotides. Alternatively, substantial identity exists when the segments will hybridize under selective hybridization conditions, to the complement of the strand.

[0453] For nucleotide and amino acid sequences, the term “identical” indicates the degree of identity between two nucleic acid or amino acid sequences when optimally aligned and compared with appropriate insertions or deletions. Alternatively, substantial identity exists when the DNA segments will hybridize under selective hybridization conditions, to the complement of the strand.

[0454] The percent identity between two sequences is a function of the number of identical positions shared by the sequences (i.e., % identity=# of identical positions/total # of positions times 100), taking into account the number of gaps, and the length of each gap, which need to be introduced for optimal alignment of the two sequences. The comparison of sequences and determination of percent identity between two sequences can be accomplished using a mathematical algorithm, as described in the non-limiting examples below.

[0455] The percent identity between two nucleotide sequences can be determined using the GAP program in the GCG software package, using a NWSgapdna.CMP matrix and a gap weight of 40, 50, 60, 70, or 80 and a length weight of 1, 2, 3, 4, 5, or 6. The percent identity between two nucleotide or amino acid sequences can also be determined using the algorithm of E. Meyers and W. Miller (Comput. Appl. Biosci., 4:11-17 (1988)) which has been incorporated into the ALIGN program (version 2.0), using a PAM120 weight residue table, a gap length penalty of 12 and a gap penalty of 4. In addition, the percent identity between two amino acid sequences can be determined using the Needleman and Wunsch (J. Mol. Biol. 48:444-453 (1970)) algorithm which has been incorporated into the GAP program in the GCG software package, using either a Blossum 62 matrix or a PAM250 matrix, and a gap weight of 16, 14, 12, 10, 8, 6, or 4 and a length weight of 1, 2, 3, 4, 5, or 6.

[0456] By way of example, a polynucleotide sequence of the present invention may be identical to the reference sequence of SEQ ID NO: 122, that is be 100% identical, or it may include up to a certain integer number of nucleotide alterations as compared to the reference sequence. Such alterations are selected from the group consisting of at least one nucleotide deletion, substitution, including transition and transversion, or insertion, and wherein said alterations may occur at the 5′ or 3′ terminal positions of the reference nucleotide sequence or anywhere between those terminal positions, interspersed either individually among the nucleotides in the reference sequence or in one or more contiguous groups within the reference sequence. The number of nucleotide alterations is determined by multiplying the total number of nucleotides in SEQ ID NO: 122 by the numerical percent of the respective percent identity (divided by 100) and subtracting that product from said total number of nucleotides in SEQ ID NO: 122, or:

nn≦xn−(xn·y),

wherein nn is the number of nucleotide alterations, xn is the total number of nucleotides in SEQ ID NO: 122, and y is 0.50 for 50%, 0.60 for 60%, 0.70 for 70%, 0.80 for 80%, 0.85 for 85%, 0.90 for 90%, 0.95 for 95%, 0.97 for 97% or 1.00 for 100%, and wherein any non-integer product of xn and y is rounded down to the nearest integer prior to subtracting it from xn. Alterations of the polynucleotide sequence of SEQ ID NO: 122 may create nonsense, missense or frameshift mutations in this coding sequence and thereby alter the polypeptide encoded by the polynucleotide following such alterations.

[0457] Similarly, in another example, a polypeptide sequence of the present invention may be identical to the reference sequence encoded by SEQ ID NO: 26, that is be 100% identical, or it may include up to a certain integer number of amino acid alterations as compared to the reference sequence such that the % identity is less than 100%. Such alterations are selected from the group consisting of at least one amino acid deletion, substitution, including conservative and non-conservative substitution, or insertion, and wherein said alterations may occur at the amino- or carboxy-terminal positions of the reference polypeptide sequence or anywhere between those terminal positions, interspersed either individually among the amino acids in the reference sequence or in one or more contiguous groups within the reference sequence. The number of amino acid alterations for a given % identity is determined by multiplying the total number of amino acids in the polypeptide sequence encoded by SEQ ID NO: 26 by the numerical percent of the respective percent identity (divided by 100) and then subtracting that product from said total number of amino acids in the polypeptide sequence encoded by SEQ ID NO: 26, or:

na≦xa−(xa·y),

wherein na is the number of amino acid alterations, xa is the total number of amino acids in the polypeptide sequence encoded by SEQ ID NO: 26, and y is, for instance 0.70 for 70%, 0.80 for 80%, 0.85 for 85% etc., and wherein any non-integer product of xa and y is rounded down to the nearest integer prior to subtracting it from xa.

### EXAMPLES

[0458] The following methods were used in the examples described herein.

### Method 1

### Binding to E. Coli-Expressed Recombinant Human IL-13 by ELISA

[0459] mAbdAb molecules were assessed for binding to recombinant E. coli-expressed human IL-13 in a direct binding ELISA. In brief, 5 μg/ml recombinant E. coli-expressed human IL-13 (made and purified at GSK) was coated to a 96-well ELISA plate. The wells were blocked for 1 hour at room temperature, mAbdAb constructs were then titrated out across the plate (usually from around 100 nM in 3-fold dilutions to around 0.01 nM). Binding was detected using an appropriate dilution of anti-human kappa light chain peroxidase conjugated antibody (catalogue number A7164, Sigma-Aldrich) or an appropriate dilution of anti-human IgG y chain specific peroxidase conjugated detection antibody (catalogue number A6029, Sigma-Aldrich).

### Method 2

### Binding to E. Coli-Expressed Recombinant Human IL-4 by ELISA

[0460] mAbdAb constructs were assessed for binding to recombinant E. coli-expressed human IL-4 in a direct binding ELISA. In brief, 5 μg/ml recombinant E. coli-expressed human IL-4 (made and purified at GSK) was coated to a 96-well ELISA plate. The wells were blocked for 1 hour at room temperature, mAbdAb constructs were then titrated out across the plate (usually from around 100 nM in 3-fold dilutions to around 0.01 nM). Binding was detected using an appropriate dilution of goat anti-human kappa light chain peroxidase conjugated antibody (catalogue number A7164, Sigma-Aldrich) or an appropriate dilution of anti-human IgG y chain specific peroxidase conjugated detection antibody (catalogue number A6029, Sigma-Aldrich).

### Method 3

### Binding to E. Coli-Expressed Recombinant Human IL-18 by ELISA

[0461] mAbdAb constructs were assessed for binding to recombinant E. coli-expressed human IL-18 in a direct binding ELISA. In brief, 5 μg/ml recombinant E. coli-expressed human IL-18 (made and purified at GSK) was coated to a 96-well ELISA plate. The wells were blocked for 1 hour at room temperature, mAbdAb constructs were then titrated out across the plate (usually from around 100 nM in 3-fold dilutions to around 0.01 nM). Binding was detected using a dilution of 1 in 2000 of anti-human kappa light chain peroxidase conjugated antibody (catalogue number A7164, Sigma-Aldrich) or using a dilution of 1 in 2000 of anti-human IgG y chain specific peroxidase conjugated detection antibody (catalogue number A6029, Sigma-Aldrich).

### Method 4

### Biacore™ Binding Affinity Assessment for Binding to E. Coli-Expressed Recombinant Human IL-13

[0462] The binding affinity of mAbdAb constructs for recombinant E. coli-expressed human IL-13 were assessed by Biacore™ analysis. Analyses were carried out using Protein A or anti-human IgG capture. Briefly, Protein A or anti-human IgG was coupled onto a CM5 chip by primary amine coupling in accordance with the manufactures recommendations. mAbdAb constructs were then captured onto this surface and human IL-13 (made and purified at GSK) passed over at defined concentrations. The surface was regenerated back to the Protein A surface using mild acid elution conditions (such as 100 mM phosphoric acid), this did not significantly affect the ability to capture antibody for a subsequent IL-13 binding event. The anti-human IgG surface was regenerated either using similar conditions to the Protein A surface or by using 3M MgCl₂. The work was carried out on the Biacore™ 3000 and/or the T100 machine, data were analysed using the evaluation software in the machines and fitted to the 1:1 model of binding. Biacore™ runs were carried out at 25° C. or 37° C.

### Method 5

### Biacore™ Binding Affinity Assessment for Binding to E. Coli-Expressed Recombinant Human IL-4

[0463] The binding affinity of mAbdAb constructs for recombinant E. coli-expressed human IL-4 were assessed by Biacore™ analysis. Analyses were carried out using Protein A or anti-human IgG capture. Briefly, Protein A or anti-human IgG was coupled onto a CM5 chip by primary amine coupling in accordance with the manufactures recommendations. mAbdAb constructs were then captured onto this surface and human IL-4 (made and purified at GSK) passed over at defined concentrations. The surface was regenerated back to the Protein A surface using mild acid elution conditions (such as 100 mM phosphoric acid), this did not significantly affect the ability to capture antibody for a subsequent IL-4 binding event. The anti-human IgG surface was regenerated either using similar conditions to the Protein A surface or by using 3M MgCl₂. The work was carried out on Biacore™ 3000 and/or the T100 and/or the A100 machine, data were analysed using the evaluation software in the machines and fitted to the 1:1 model of binding. Biacore™ runs were carried out at 25° C. or 37° C.

### Method 6

### Biacore™ Binding Affinity Assessment for Binding to E. Coli-Expressed Recombinant Human IL-18

[0464] The binding affinity of mAbdAb constructs for recombinant E. coli-expressed human IL-18 was assessed by Biacore™ analysis. Analyses were carried out using Protein A or anti-human IgG capture. Briefly, Protein A or anti-human IgG was coupled onto a CM5 chip by primary amine coupling in accordance with the manufactures recommendations. mAbdAb constructs were then captured onto this surface and human IL-18 (made and purified at GSK) passed over at defined concentrations. The surface was regenerated back to the Protein A surface using mild acid elution conditions (such as 100 mM phosphoric acid), this did not significantly affect the ability to capture antibody for a subsequent IL-18 binding event. The anti-human IgG surface was regenerated either using similar conditions to the Protein A surface or by using 3M MgCl₂. The work was carried out on Biacore™ 3000 and/or the T100 and/or the A100 machine, data were analysed using the evaluation software in the machines and fitted to the 1:1 model of binding. The Biacore™ run was carried out at 25° C.

### Method 7

[0465] Stoichiometry Assessment of mAbdAb Bispecific Antibodies or Trispecific Antibody for IL-13, IL-4 or IL-18 (using Biacore™)

[0466] Anti-human IgG was immobilised onto a CM5 biosensor chip by primary amine coupling. mAbdAb constructs were captured onto this surface after which a single concentration of IL-13, IL-4 or IL-18 cytokine was passed over, this concentration was enough to saturate the binding surface and the binding signal observed reached full R-max. Stoichiometries were then calculated using the given formula:

Stoich=Rmax*Mw(ligand)/Mw(analyte)*R(ligand immobilised or captured)

[0467] Where the stoichiometries were calculated for more than one analyte binding at the same time, the different cytokines were passed over sequentially at the saturating cytokine concentration and the stoichometries calculated as above. The work was carried out on the Biacore 3000, at 25° C. using HBS-EP running buffer.

### Method 8

### Neutralisation of E. Coli-Expressed Recombinant Human IL-13 in a TF-1 Cell Proliferation Bioassay

[0468] TF-1 cells proliferate in response to a number of different cytokines including human IL-13. The proliferative response of these cells for IL-13 can therefore be used to measure the bioactivity of IL-13 and subsequently an assay has been developed to determine the IL-13 neutralisation potency (inhibition of IL-13 bioactivity) of mAbdAb constructs.

[0469] The assay was performed in sterile 96-well tissue culture plates under sterile conditions and all test wells were performed in triplicate. Approximately 14 ng/ml recombinant E. Coli-expressed human IL-13 was pre-incubated with various dilutions of mAbdAb constructs (usually from 200 nM titrated in 3-fold dilutions to 0.02 nM) in a total volume of 50 μl for 1 hour at 37° C. These samples were then added to 50 μl of TF-1 cells (at a concentration of 2×10⁵ cells per ml) in a sterile 96-well tissue culture plate. Thus the final 100% assay volume contained various dilutions of mAbdAb constructs (at a final concentration of 100 nM titrated in 3-fold dilutions to 0.01 nM), recombinant E. Coli-expressed human IL-13 (at a final concentration of 7 ng/ml) and TF-1 cells (at a final concentration of 1×10⁵ cells per ml). The assay plate was incubated at 37° C. for approximately 3 days in a humidified CO₂ incubator. The amount of cell proliferation was then determined using the ‘CellTitre 96® Non-Radioactive Cell Proliferation Assay’ from Promega (catalogue number G4100), as described in the manufacturers instructions. The absorbance of the samples in the 96-well plate was read in a plate reader at 570 nm.

[0470] The capacity of the mAbdAb constructs to neutralise recombinant E. Coli-expressed human IL-13 bioactivity was expressed as that concentration of the mAbdAb construct required to neutralise the bioactivity of the defined amount of human IL-13 (7 ng/ml) by 50% (═ND₅₀). The lower the concentration of the mAbdAb construct required, the more potent the neutralisation capacity. The ND₅₀ data provided herein were calculated manually or by using the Robosage software package which is inherent within microsoft excel.

### Method 9

### Neutralisation of E. Coli-Expressed Recombinant Human IL-4 in a TF-1 Cell Proliferation Bioassay

[0471] TF-1 cells proliferate in response to a number of different cytokines including human IL-4. The proliferative response of these cells for IL-4 can therefore be used to measure the bioactivity of IL-4 and subsequently an assay has been developed to determine the IL-4 neutralisation potency (inhibition of IL-4 bioactivity) of mAbdAb constructs.

[0472] The assay was performed in sterile 96-well tissue culture plates under sterile conditions and all test wells were performed in triplicate. Approximately 2.2 ng/ml recombinant E. Coli-expressed human IL-4 was pre-incubated with various dilutions of mAbdAb constructs (usually from 200 nM titrated in 3-fold dilutions to 0.02 nM) in a total volume of 50 μl for 1 hour at 37° C. These samples were then added to 50 μl of TF-1 cells (at a concentration of 2×10⁵ cells per ml) in a sterile 96-well tissue culture plate. Thus the final 100% assay volume contained various dilutions of mAbdAb constructs (at a final concentration of 100 nM titrated in 3-fold dilutions to 0.01 nM), recombinant E. Coli-expressed human IL-4 (at a final concentration of 1.1 ng/ml) and TF-1 cells (at a final concentration of 1×10⁵ cells per ml). The assay plate was incubated at 37° C. for approximately 3 days in a humidified CO₂ incubator. The amount of cell proliferation was then determined using the ‘CellTitre 96® Non-Radioactive Cell Proliferation Assay’ from Promega (catalogue number G4100), as described in the manufacturers instructions. The absorbance of the samples in the 96-well plate was read in a plate reader at 570 nm.

[0473] The capacity of the mAbdAb constructs to neutralise recombinant E. Coli-expressed human IL-4 bioactivity was expressed as that concentration of the mAbdAb construct required to neutralise the bioactivity of the defined amount of human IL-4 (1.1 ng/ml) by 50% (═ND₅₀). The lower the concentration of the mAbdAb construct required, the more potent the neutralisation capacity. The ND₅₀ data provided herein were calculated manually or by using the Robosage software package which is inherent within microsoft excel.

### Method 10

### Dual Neutralisation of E. Coli-Expressed Recombinant Human IL-13 and E. Coli-Expressed Recombinant Human IL-4 in a TF-1 Cell Proliferation Bioassay

[0474] TF-1 cells proliferate in response to a number of different cytokines including human IL-13 and human IL-4. The proliferative response of these cells for IL-13 and IL-4 can therefore be used to measure the bioactivity of IL-13 and IL-4 simultaneously and subsequently an assay has been developed to determine the dual IL-13 and IL-4 neutralisation potency (dual inhibition of IL-13 and IL-4 bioactivity) of mAbdAb constructs.

[0475] The assay was performed in sterile 96-well tissue culture plates under sterile conditions and all test wells were performed in triplicate. Approximately 14 ng/ml recombinant E. Coli-expressed human IL-13 and approximately 2.2 ng/ml recombinant E. Coli-expressed human IL-4 were pre-incubated with various dilutions of mAbdAb constructs (usually from 200 nM titrated in 3-fold dilutions to 0.02 nM) in a total volume of 50 μl for 1 hour at 37° C. These samples were then added to 50 μl of TF-1 cells (at a concentration of 2×10⁵ cells per ml) in a sterile 96-well tissue culture plate. Thus the final 100 μl assay volume, contained various dilutions of mAbdAb constructs (at a final concentration of 100 nM titrated in 3-fold dilutions to 0.01 nM), recombinant E. Coli-expressed human IL-13 (at a final concentration of 7 ng/ml), recombinant E. Coli-expressed human IL-4 (at a final concentration of 1.1 ng/ml) and TF-1 cells (at a final concentration of 1×10⁵ cells per ml). The assay plate was incubated at 37° C. for approximately 3 days in a humidified CO₂ incubator. The amount of cell proliferation was then determined using the ‘CellTitre 96® Non-Radioactive Cell Proliferation Assay’ from Promega (catalogue number G4100), as described in the manufacturers instructions. The absorbance of the samples in the 96-well plate was read in a plate reader at 570 nm.

### Method 11

### Biacore™ Binding Affinity Assessment for Binding to Sf21-Expressed Recombinant Human IL-5

[0476] The binding affinity of mAbdAb molecules for recombinant Sf21-expressed human IL-5 was assessed by Biacore™ analysis. Analyses were carried out using Protein A or anti-human IgG capture. Briefly, Protein A or anti-human IgG was coupled onto a CM5 chip by primary amine coupling in accordance with the manufactures recommendations. mAbdAb molecules were then captured onto this surface and human IL-5 (made and purified at GSK) passed over at defined concentrations. The surface was regenerated back to the Protein A surface using mild acid elution conditions (such as 100 mM phosphoric acid), this did not significantly affect the ability to capture antibody for a subsequent IL-5 binding event. The anti-human IgG surface was regenerated either using similar conditions to the Protein A surface or by using 3M MgCl₂. The work was carried out on Biacore™ 3000, T100 and A100 machines, data were analysed using the evaluation software in the machines and fitted to the 1:1 model of binding. The Biacore™ run was carried out at 25° C.

### Method 12

### VEGF Receptor Binding Assay.

[0477] This assay measures the binding of VEGF₁₆₅ to VEGF R2 (VEGF receptor) and the ability of test molecules to block this interaction. ELISA plates were coated overnight with VEGF receptor (R&D Systems, Cat No: 357-KD-050) (0.5 μg/ml final concentration in 0.2M sodium carbonate bicarbonate pH9.4), washed and blocked with 2% BSA in PBS. VEGF (R&D Systems, Cat No: 293-VE-050) and the test molecules (diluted in 0.1% BSA in 0.05% Tween 20™ PBS) were pre-incubated for one hour prior to addition to the plate (3 ng/ml VEGF final concentration). Binding of VEGF to VEGF receptor was detected using biotinylated anti-VEGF antibody (0.5 μg/ml final concentration) (R&D Systems, Cat No: BAF293) and a peroxidase conjugated anti-biotin secondary antibody (1:5000 dilution) (Stratech, Cat No: 200-032-096) and visualised at OD450 using a calorimetric substrate (Sure Blue TMB peroxidase substrate, KPL) after stopping the reaction with an equal volume of 1 M HCl.

### Method 13

### EGFR Kinase Assay

[0478] Activation of EGFR expressed on the surface of A431 cells through its interaction with EGF leads to tyrosine kinase phosphorylation of the receptor. Reduction of EGFR tyrosine kinase phosphorylation was measured to determine potency of test molecules. A431 cells were allowed to adhere to 96 well tissue culture plates overnight then the test molecule was added and left for 1 hour and then incubated for 10 min with EGF (at 300 ng/ml) (R&D Systems catalogue number 236-EG). The cells were lysed and the lysed preparation transferred to ELISA plates coated with anti-EGFR antibody (at 1 ug/ml) (R&D Systems, cat #AF231). Both phosphorylated and non-phosphorylated EGFR present in the lysed cell solution was captured. After washing away unbound material phosphorylated EGFR was specifically detected using a HRP conjugated anti-phosphotyrosine antibody (1:2000 dilution) (Upstate Biotechnology, cat #16-105). Binding was visualised using a colorimetric substrate.

### Method 14

### MRC-5/TNF Assay

[0479] The ability of test molecules to prevent human TNF-a binding to human TNFR1 and neutralise IL-8 secretion was determined using human lung fibroblast MRC-5 cells. A dilution series of test samples was incubated with TNF-a (500 pg/ml) (Peprotech) for 1 hour. This was then diluted 1 in 2 with a suspension of MRC-5 cells (ATCC, Cat.# CCL-171) (5×10³ cells/well). After an overnight incubation, samples were diluted 1 in 10, and IL-8 release was determined using an IL-8 ABI 8200 cellular detection assay (FMAT) where the IL-8 concentration was determined using anti-IL-8 (R&D systems, Cat# 208-IL) coated polystyrene beads, biotinylated anti-IL-8 (R&D systems, Cat# BAF208) and streptavidin Alexafluor 647 (Molecular Probes, Cat#S32357). The assay readout was localised fluorescence emission at 647 nm and unknown IL-8 concentrations were interpolated using an IL-8 standard curve included in the assay.

### Method 15

### MRC-5/IL-1 Assay.

[0480] The ability of test molecules to prevent human IL-1a binding to human ILl-R and neutralise IL-8 secretion was determined using human lung fibroblast MRC-5 cells. MRC-5 cells (ATCC, Cat.# CCL-171) were trypsinised then incubated with the test samples for one hour as a suspension. IL-1a (200 pg/ml final concentration) (R&D Systems cat no: 200-LA) was then added. After an overnight incubation IL-8 release was determined using an IL-8 quantification ELISA kit (R&D Systems) with anti-IL-8 coated ELISA plates, biotinylated anti-IL-8 and streptavidin-HRP. The assay readout is colourimetric absorbance at 450 nm and unknown IL-8 concentrations are interpolated using an IL-8 standard curve included in the assay.

### Method 16

### Neutralisation Potency of E. Coli-Expressed Recombinant Human IL-13 or IL-4 in a Whole Blood Phospho-STAT6 Bioassay

[0481] Whole blood cells can be stimulated ex-vivo with recombinant E. Coli-expressed human IL-4 (rhIL-14) or IL-13 (rhIL-13) to express phospho STAT6 (pSTAT6). This assay was developed to quantitatively measure pSTAT6 and consequently determine the neutralisation potency (inhibition of IL-4 or IL-13 bioactivity) of mAbdAb constructs.

[0482] The assay was performed in sterile 96-well tissue culture plates under sterile conditions and all test wells were performed in triplicate. 12 ng/ml of rhIL-13 or rhIL-4 was prepared in serum free cell culture medium and 31.2 μL added to wells of a 96-well plate. A 9 point dilution curve of mAbdAb constructs or isotype control was prepared at 6× the final assay concentration and 31.2 μL of each dilution added to wells containing either rhIL-4 or rhIL-13. 125 μL of heparinized human whole blood was added to all wells and mixed on a shaker for 30 seconds. The final assay volume contained various dilutions of mAbdAb constructs together with rhIL-13 or rhIL-4 at a final concentration of 2 ng/mL. The assay plate was incubated at 37° C., 5% CO₂ for 60 minutes.

[0483] The cells were then lysed by the addition of 62.5 μL of 4× lysis buffer. The lysis buffer contained final assay concentrations of 50 mM Tris hydrochloride, 300 mM sodium chloride, 1% NP40, 0.5% sodium deoxycholate, 50 mM sodium fluoride, 1 mM sodium orthovanadate, 1 mM EDTA, and protease inhibitor cocktail. The plates were placed on ice for 30 minutes then frozen at −80° C. until assayed for pSTAT6.

[0484] The measurement of pSTAT6 in the whole blood samples was performed using an electro-chemiluminescent immuno-assay (Meso-Scale-Discovery, MSD). In brief, avidin coated 96-well MSD plates were blocked with 150 μL per well of 5% MSD blocker A for 1 hour at room temperature on a shaker at 750 rpm. The plate was washed 3 times with 150 μL per well of MSD Tris wash buffer. 25 μL per well of capture antibody (biotinylated mouse anti-human STAT6 monoclonal antibody) was added and the plates incubated overnight at 4° C. The capture antibody had been diluted to 4 μg/mL in assay buffer consisting of 50 mM Tris, 150 mM sodium chloride, 0.2% BSA, 0.5% Tween 20, 1 mM EDTA. The plate was washed 3 times with MSD tris wash buffer then blocked with 150 μL of 5% MSD blocker A for 1 hour at room temperature on a shaker. Plates were washed 3 times as stated previously, then 25 μL of whole blood lysate or pSTAT6 calibrator added per well. Plates were incubated for 3 hours at room temperature on a shaker. Plates were washed 3 times then 25 μL of rabbit anti human pSTAT6 antibody (diluted 1 in 800 in assay buffer) was added and then incubated for 1 hour at room temperature. After further washing, 25 μL per well of a 1 in 500 dilution of MSD TAG goat anti-rabbit IgG antibody was added and then incubated for 1 hour at room temperature on a shaker. Plates were washed again before addition of 150 μL per well of 2×MSD read buffer T. Plates were read immediately on a MSD SECTOR imager.

[0485] The ability of the mAbdAb constructs to neutralise rhIL-13 or rhIL-4 bioactivity was expressed as the concentration of the mAbdAb construct required to neutralise 2 ng/mL of human IL-4 or human IL-13 by 50% (IC₅₀). The lower the concentration of the mAbdAb construct required, the more potent the neutralisation capacity.

### Method 17

### Binding to E. Coli-Expressed Recombinant Cynomolgus IL-13 by ELISA

[0486] mAbdAb molecules were assessed for binding to recombinant E. coli-expressed cynomolgus IL-13 in a direct binding ELISA. In brief, 5 μg/ml recombinant E. coli-expressed cynomolgus IL-13 (made and purified at GSK) was coated to a 96-well ELISA plate. The wells were blocked for 1 hour at room temperature, mAbdAb molecules were then titrated out across the plate (usually from around 100 nM in 3-fold dilutions to around 0.01 nM). Binding was detected using an appropriate dilution of anti-human kappa light chain peroxidase conjugated antibody (catalogue number A7164, Sigma-Aldrich) or an appropriate dilution of anti-human IgG y chain specific peroxidase conjugated detection antibody (catalogue number A6029, Sigma-Aldrich).

### Method 18

[0487] Not used

### Method 19

### Inhibition of Human IL-4 Binding to Human IL4 Receptor Alpha (IL4Rα) by ELISA

[0488] Unless otherwise stated all reagents were diluted to the required concentration in block solution (4% bovine serum albumin in tris-buffered saline and 0.05% Tween20) just prior to use. An ELISA plate was coated over-night at 4° C. with 5 μg/ml of recombinant human IL4Rα-Fc chimaera (R&D Systems, Cat. No. 604-4R) in phosphate buffered saline. All subsequent steps were carried out at room temperature. The plate was blocked for 2 hours in block solution before addition of 50 μl of various concentrations of mAbdAb (or the positive control mAbs or dAbs) which had been pre-mixed with 0.02 μg/ml of recombinant human IL-4 (made at GSK). Plates were incubated for 1 hour before washing 4 times in wash buffer (Tris buffered saline and 0.05% Tween20). 50 μl of a 0.5 μg/ml solution of biotinylated anti-human IL-4 (R&D Systems, Cat. No. BAF 204) was added to each well and incubated for 1 hour. The plate was washed x4 in wash buffer before addition of 50 μl/well of a 1/2000 dilution of Extravadin (Sigma, Cat. No. E2886). After one hour the plate was washed 4 times and a colourimetric signal was detected by incubating with OPD peroxidase substrate (from Sigma), the reaction was stopped with the stop solution (3M H₂SO₄ acid) and absorbance data obtained by reading on a plate-reader at 490 nm. Mean absorbance and standard error was plotted in Graph Pad Prism and IC₅₀ values were calculated using Cambridge Soft BioAssay.

### Method 20

### Neutralisation of E. Coli-Expressed Recombinant Cynomolgus IL-13 in a TF-1 Cell Proliferation Bioassay

[0489] TF-1 cells proliferate in response to a number of different cytokines including cynomolgus IL-13. The proliferative response of these cells for IL-13 can therefore be used to measure the bioactivity of IL-13 and subsequently an assay has been developed to determine the IL-13 neutralisation potency (inhibition of IL-13 bioactivity) of mAbdAb constructs.

[0490] The assay was performed in sterile 96-well tissue culture plates under sterile conditions and all test wells were performed in triplicate. Approximately 14 ng/ml recombinant E. Coli-expressed cynomolgus IL-13 was pre-incubated with various dilutions of mAbdAb constructs (usually from 1000 nM or 200 nM titrated in 3-fold dilutions to 1 nM or 0.02 nM) in a total volume of 50 μl for 1 hour at 37° C. These samples were then added to 50 μl of TF-1 cells (at a concentration of 2×10⁵ cells per ml) in a sterile 96-well tissue culture plate. Thus the final 100 μl assay volume contained various dilutions of mAbdAb constructs (at a final concentration of 500 nM or 100 nM titrated in 3-fold dilutions to 0.5 nM or 0.01 nM), recombinant E. Coli-expressed cynomolgus IL-13 (at a final concentration of 7 ng/ml) and TF-1 cells (at a final concentration of 1×10⁵ cells per ml). The assay plate was incubated at 37° C. for approximately 3 days in a humidified CO₂ incubator. The amount of cell proliferation was then determined using the ‘CellTitre 96® Non-Radioactive Cell Proliferation Assay’ from Promega (catalogue number G4100), as described in the manufacturers instructions. The absorbance of the samples in the 96-well plate was read in a plate reader at 570 nm.

[0491] The capacity of the mAbdAb constructs to neutralise recombinant E. Coli-expressed cynomolgus IL-13 bioactivity was expressed as that concentration of the mAbdAb construct required to neutralise the bioactivity of the defined amount of cynomolgus IL-13 (7 ng/ml) by 50% (═ND₅₀). The lower the concentration of the mAbdAb construct required, the more potent the neutralisation capacity. The ND₅₀ data provided herein were calculated manually or by using the Robosage software package which is inherent within microsoft excel.

### Method 21

### Neutralisation of E. Coli-Expressed Recombinant Cynomolgus IL-4 in a TF-1 Cell Proliferation Bioassay

[0492] TF-1 cells proliferate in response to a number of different cytokines including cynomolgus IL-4. The proliferative response of these cells for IL-4 can therefore be used to measure the bioactivity of IL-4 and subsequently an assay has been developed to determine the IL-4 neutralisation potency (inhibition of IL-4 bioactivity) of mAbdAb constructs.

[0493] The assay was performed in sterile 96-well tissue culture plates under sterile conditions and all test wells were performed in triplicate. Approximately 2.2 ng/ml recombinant E. Coli-expressed cynomolgus IL-4 was pre-incubated with various dilutions of mAbdAb constructs (usually from 200 nM titrated in 3-fold dilutions to 0.02 nM) in a total volume of 50 μl for 1 hour at 37° C. These samples were then added to 50 μl of TF-1 cells (at a concentration of 2×10⁵ cells per ml) in a sterile 96-well tissue culture plate. Thus the final 100 μl assay volume contained various dilutions of mAbdAb constructs (at a final concentration of 100 nM titrated in 3-fold dilutions to 0.01 nM), recombinant E. Coli-expressed cynomolgus IL-4 (at a final concentration of 1.1 ng/ml) and TF-1 cells (at a final concentration of 1×10⁵ cells per ml). The assay plate was incubated at 37° C. for approximately 3 days in a humidified CO₂ incubator. The amount of cell proliferation was then determined using the ‘CellTitre 96® Non-Radioactive Cell Proliferation Assay’ from Promega (catalogue number G4100), as described in the manufacturers instructions. The absorbance of the samples in the 96-well plate was read in a plate reader at 570 nm.

[0494] The capacity of the mAbdAb constructs to neutralise recombinant E. Coli-expressed cynomolgus IL-4 bioactivity was expressed as that concentration of the mAbdAb construct required to neutralise the bioactivity of the defined amount of cynomolgus IL-4 (1.1 ng/ml) by 50% (=ND₅₀). The lower the concentration of the mAbdAb construct required, the more potent the neutralisation capacity. The ND₅₀ data provided herein were calculated manually or by using the Robosage software package which is inherent within microsoft excel.

### Method 22

### Inhibition of Human IL-13 Binding to Human IL13 Receptor Alpha 2 (IL13Rα2) by ELISA

[0495] Unless otherwise stated all reagents were diluted to the required concentration in block solution (1% bovine serum albumin in tris-buffered saline and 0.05% Tween20) just prior to use. An ELISA plate was coated overnight at 4° C. with 5 μg/ml of recombinant human IL13Rα2/Fc chimera expressed in Sf21 cells (R&D Systems, Cat. No. 614-IR) in a solution of coating buffer (0.05M bicarbonate pH9.6, Sigma C-3041). The plate was blocked for 1 hour at room temperature in block solution (1% BSA in TBST) before addition of various concentrations of mAbdAb (or the positive control mAbs or dAbs) which had been pre-incubated with 30 ng/ml of recombinant human IL-13 (made at GSK) for 30 mins at 37° C. Plates were incubated for 1 hour at room temperature before washing 3 times in wash buffer (Tris buffered saline and 0.05% Tween20). 50 μl of a 0.5 μg/ml solution of biotinylated anti-human IL-13 (R&D Systems, Cat. No. BAF 213) was added to each well and incubated for 1 hour at room temperature. The plate was washed three times in wash buffer before addition of an appropriate dilution of Extravadin (Sigma, Cat. No. E2886). After one hour the plate was washed and a colourimetric signal was detected by incubating with OPD peroxidase substrate (from Sigma), the reaction was stopped with the stop solution (3M acid) and absorbance data obtained by reading on a plate-reader at 490 nm. Mean absorbance and standard error was plotted in Excel sheet and IC₅₀ values were calculated using the Robosage software from Microsoft Excel.

### Method 23

### Biacore™ Binding Affinity Assessment for Binding to E. Coli-Expressed Recombinant Cynomolgus IL-13

[0496] The binding affinity of mAbdAb (or mAb) molecules for recombinant E. coli-expressed cynomolgus IL-13 was assessed by Biacore™ analysis. Analyses were carried out using Protein A or anti-human IgG capture. Briefly, Protein A or anti-human IgG was coupled onto a CM5 chip by primary amine coupling in accordance with the manufactures recommendations. mAbdAb (or mAb) molecules were then captured onto this surface and cynomolgus IL-13 (made and purified at GSK) passed over at defined concentrations. The surface was regenerated back to the Protein A surface using mild acid elution conditions, this did not significantly affect the ability to capture antibody for a subsequent IL-13 binding event. The work was carried out on BIAcore™ 3000 and/or the T100 machine, data were analysed using the evaluation software in the machines and fitted to the 1:1 model of binding. BIAcore™ runs were carried out at 25° C. or 37° C.

### Method 24

### BIAcore™ Binding Affinity Assessment for Binding to E. Coli-Expressed Recombinant Cynomolgus IL-4

[0497] The binding affinity of mAbdAb (or mAb) molecules for recombinant E. coli-expressed cynomolgus IL-4 were assessed by BIAcore™ analysis. Analyses were carried out using Protein A or anti-human IgG capture. Briefly, Protein A or anti-human IgG was coupled onto a CM5 chip by primary amine coupling in accordance with the manufactures recommendations. mAbdAb (or mAb) molecules were then captured onto this surface and cynomolgus IL-4 (made and purified at GSK) passed over at defined concentrations. The surface was regenerated back to the Protein A surface using mild acid elution conditions (such as 100 mM phosphoric acid), this did not significantly affect the ability to capture antibody for a subsequent IL-4 binding event. The anti-human IgG surface was regenerated either using similar conditions to the Protein A surface or by using 3M MgCl₂. The work was carried out on BIAcore™ 3000 and/or the T100 and/or the A100 machine, data were analysed using the evaluation software in the machines and fitted to the 1:1 model of binding. BIAcore™ runs were carried out at 25° C. or 37° C.

### Method 25

### IL-13 Cell-Based Neutralisation Assay

[0498] The potency of mAbdAbs having specificity for IL13 was assayed in an IL-13 cell assay using the engineered reporter cell line HEK Blue-STAT6.

[0499] The transcription factor STAT6 is activated primarily by two cytokines with overlapping biologic functions, IL-4 and IL-13 which bind a receptor complex composed of the IL-4Ralpha and IL-13Ralpha1. Upon ligand binding, the receptor complex activates the receptor-associated Janus kinases (JAK1 and Tyk2) leading to the recruitment of STAT6 and its phosphorylation. Activated STAT6 forms a homodimer that translocates to the nucleus, inducing transcription of genes under the control of the responsive promoter. The HEK Blue-STAT6 line is engineered to express Secreted Embryonic Alkaline Phosphatase (SEAP) under the control of such a promoter.

[0500] Cells were plated into 96 well plates and incubated for 20-24 hours with pre-equilibrated human IL-13 and test molecules. After this incubation period, the amount of SEAP produced by the cells as a result of IL-13 stimulation was then measured using the Quanti-blue system (Invivogen).

### Example 1

### 1. Generation of Dual Targeting mAbdAbs

[0501] The dual targeting mAbdAbs set out in Tables 1-4 were constructed in the following way. Expression constructs were generated by grafting a sequence encoding a domain antibody on to a sequence encoding a heavy chain or a light chain (or both) of a monoclonal antibody such that when expressed the dAb is attached to the C-terminus of the heavy or light chain. For some constructs, linker sequences were used to join the domain antibody to heavy chain CH3 or light chain CK. In other constructs the domain antibody is joined directly to the heavy or light chain with no linker sequence. A general schematic diagram of these mAbdAb constructs is shown in FIG. 8 (the mAb heavy chain is drawn in grey; the mAb light chain is drawn in white; the dAb is drawn in black).

[0502] An example of mAbdAb type 1 as set out in FIG. 8 would be PascoH-G4S-474. An example of mAbdAb type 2 as set out in FIG. 8 would be PascoL-G4S-474. An example of mAbdAb type 3 as set out in FIG. 8 would be PascoHL-G4S-474. mAbdAb types 1 and 2 are tetravalent constructs, mAbdAb type 3 is a hexavalent construct.

[0503] A schematic diagram illustrating the construction of a mAbdAb heavy chain (top illustration) or a mAbdAb light chain (bottom illustration) is shown below. Unless otherwise stated, these restriction sites were used to construct the mAbdAbs described in Tables 1-4

[chemical structure]

[0504] Note that for the heavy chain the term ‘V_{H}’ is the monoclonal antibody variable heavy chain sequence; ‘CH1, CH2 and CH3’ are human IgG1 heavy chain constant region sequences; ‘linker’ is the sequence of the specific linker region used; ‘dAb’ is the domain antibody sequence. For the light chain the term ‘V_{L}’ is the monoclonal antibody variable light chain sequence; ‘CK’ is the human light chain constant region sequence; ‘linker’ is the sequence of the specific linker region used; ‘dAb’ is the domain antibody sequence.

[0505] Some DNA expression constructs were made de novo by oligo build. And other DNA expression constructs were derived from existing constructs (which were made as described above) by restriction cloning or site-directed mutagenesis.

[0506] These constructs (mAbdAb heavy or light chains) were cloned into mammalian expression vectors (Rln, Rld or pTT vector series) using standard molecular biology techniques. A mammalian amino acid signal sequence (as shown in SEQ ID NO: 64) was used in the construction of these constructs.

[0507] For expression of mAbdAbs where the dAb is joined to the C-terminal end of the heavy chain of the monoclonal antibody, the appropriate heavy chain mAbdAb expression vector was paired with the appropriate light chain expression vector for that monoclonal antibody. For expression of mAbdAbs where the dAb is joined to the C-terminal end of the light chain of the monoclonal antibody, the appropriate light chain mAbdAb expression vector was paired with the appropriate heavy chain expression vector for that monoclonal antibody.

[0508] For expression of mAbdAbs where the dAb is joined to the C-terminal end of the heavy chain of the monoclonal antibody and where the dAb is joined to the C-terminal end of the light chain of the monoclonal antibody, the appropriate heavy chain mAbdAb expression vector was paired with the appropriate light chain mAbdAb expression vector.

### 1.1 Nomenclature and Abbreviations Used

[0509] Monoclonal antibody (mAb)
Monoclonal antibodies (mAbs)
Domain antibody (dAb)
Domain antibodies (dAbs)
Heavy Chain (H chain)

[0510] Light chain (L chain)

Heavy chain variable region (V_{H})
Light chain variable region (V_{L})
Human IgG1 constant heavy region 1 (CH1)
Human IgG1 constant heavy region 2 (CH2)
Human IgG1 constant heavy region 3 (CH3)
Human kappa light chain constant region (CK)

### 1.2 Anti-IL13 mAb-Anti-IL4dAbs

[0511] Bispecific anti-IL13 mAb-anti-IL4dAbs were constructed by as described above. A number of different linkers were used to join the anti-IL4 domain antibodies to the monoclonal antibody. Some constructs had no linker.

[0512] Note that a BamHI cloning site (which codes for amino acid residues G and S) was used to clone the linkers and dAbs either to CH3 of the mAb heavy chain or to CK of the mAb light chain. Thus in addition to the given linker sequence, additional G and S amino acid residues are present between the linker sequence and the domain antibody for both heavy chain and light chain expression constructs or between CH3 and the linker sequence in some but not all heavy chain expression constructs. However, when the G4S linker was placed between the mAb and dAb in the mAbdAb format, the BamHI cloning site was already present (due to the G and S amino acid residues inherent within the G4S linker sequence) and thus additional G and S amino acid residues were not present between CH3 or CK and the domain antibody in the constructs using this linker. When no linker sequence was between used n the mAb and dAb in the mAbdAb format, the BamHI cloning site (and hence the G and S amino acid residues) was still present between CH3 or CK and the domain antibody. Full details on the amino acid sequences of mAbdAb heavy and light chains are set out in Table 1.

[0513] Several of the following examples use an IL-4 mAb as a control antibody. The control IL-4 mAb used in these examples will either be the antibody having the heavy chain sequence of SEQ ID NO: 14 and the light chain sequence of SEQ ID NO: 15, or will be the antibody having the heavy chain sequence of SEQ ID NO: 166 and the light chain sequence of SEQ ID NO: 15. Both of these IL-4 mAbs share the same CDRs, and are expected to bind in the same way hence both of these antibodies are referred to as ‘Pascolizumab’ or ‘IL-4 mAb’ in the following examples.

[0514] Several of the following examples use an IL-5 mAb as a control antibody. The control IL-5 mAb used in these examples will either be the antibody having the heavy chain sequence of SEQ ID NO: 65 and the light chain sequence of SEQ ID NO: 66, or the antibody having the heavy chain sequence of SEQ ID NO: 191 and the light chain sequence of SEQ ID NO: 66. Both of these IL-5 antibodies share the same CDRs, and are expected to bind in the same way hence both of these antibodies are referred to as ‘Mepolizumab’ or ‘IL-5 mAb’ in the following examples.

[0515] The mAbdAbs set out in table 1 were expressed transiently in CHOK1 cell supernatants. Following mAbdAb quantification these mAbdAb containing supernatants were analysed for activity in IL-13 and IL-4 binding ELISAs.

TABLE 1

| Name | Description | Sequence ID No. |
|---|---|---|
| 586H-25 | H chain = Anti-human IL-13 mAb heavy | 16 (=H chain) |
| | chain-GS-DOM9-155-25 dAb | 13 (=L chain) |
| | L chain = Anti-human IL-13 mAb light | |
| | chain | |
| 586H-G4S-25 | H chain = Anti-human IL-13 mAb heavy | 20 (=H chain) |
| | chain-G4S linker-DOM9-155-25 dAb | 13 (=L chain) |
| | L chain = Anti-human IL-13 mAb light | |
| | chain | |
| 586H-TVAAPS-25 | H chain = Anti-human IL-13 mAb heavy | 24 (=H chain) |
| | chain-TVAAPS linker-GS-DOM9-155-25 | 13 (=L chain) |
| | dAb | |
| | L chain = Anti-human IL-13 mAb light | |
| | chain | |
| 586H-ASTKG-25 | H chain = Anti-human IL-13 mAb heavy | 28 (=H chain) |
| | chain-GS-ASTKGPT linker-GS-DOM9- | 13 (=L chain) |
| | 155-25 dAb | |
| | L chain = Anti-human IL-13 mAb light | |
| | chain | |
| 586H-EPKSC-25 | H chain = Anti-human IL-13 mAb heavy | 32 (=H chain) |
| | chain-GS-EPKSCDKTHTCPPCP linker- | 13 (=L chain) |
| | GS-DOM9-155-25 dAb | |
| | L chain = Anti-human IL-13 mAb light | |
| | chain | |
| 586H-ELQLE-25 | H chain = Anti-human IL-13 mAb heavy | 36 (=H chain) |
| | chain-ELQLEESCAEAQDGELDG linker- | 13 (=L chain) |
| | GS-DOM9-155-25 dAb | |
| | L chain = Anti-human IL-13 mAb light | |
| | chain | |
| 586H-147 | H chain = Anti-human IL-13 mAb heavy | 17 (=H chain) |
| | chain-GS-DOM9-155-147 dAb | 13 (=L chain) |
| | L chain = Anti-human IL-13 mAb light | |
| | chain | |
| 586H-G4S-147 | H chain = Anti-human IL-13 mAb heavy | 21 (=H chain) |
| | chain-G4S linker-DOM9-155-147 dAb | 13 (=L chain) |
| | L chain = Anti-human IL-13 mAb light | |
| | chain | |
| 586H-TVAAPS-147 | H chain = Anti-human IL-13 mAb heavy | 25 (=H chain) |
| | chain-TVAAPS linker-GS-DOM9-155-147 | 13 (=L chain) |
| | dAb | |
| | L chain = Anti-human IL-13 mAb light | |
| | chain | |
| 586H-ASTKG-147 | H chain = Anti-human IL-13 mAb heavy | 29 (=H chain) |
| | chain-GS-ASTKGPT linker-DOM9-155- | 13 (=L chain) |
| | 147 dAb | |
| | L chain = Anti-human IL-13 mAb light | |
| | chain | |
| 586H-EPKSC-147 | H chain = Anti-human IL-13 mAb heavy | 33 (=H chain) |
| | chain-GS-EPKSCDKTHTCPPCP linker- | 13 (=L chain) |
| | GS-DOM9-155-147 dAb | |
| | L chain = Anti-human IL-13 mAb light | |
| | chain | |
| 586H-ELQLE-147 | H chain = Anti-human IL-13 mAb heavy | 37 (=H chain) |
| | chain-GS-ELQLEESCAEAQDGELDG | 13 (=L chain) |
| | linker-GS-DOM9-155-147 dAb | |
| | L chain = Anti-human IL-13 mAb light | |
| | chain | |
| 586H-154 | H chain = Anti-human IL-13 mAb heavy | 18 (=H chain) |
| | chain-GS-DOM9-155-154 dAb | 13 (=L chain) |
| | L chain = Anti-human IL-13 mAb light | |
| | chain | |
| 586H-G4S-154 | H chain = Anti-human IL-13 mAb heavy | 22 (=H chain) |
| | chain-G4S linker-DOM9-155-154 dAb | 13 (=L chain) |
| | L chain = Anti-human IL-13 mAb light | |
| | chain | |
| 586H-TVAAPS-154 | H chain = Anti-human IL-13 mAb heavy | 26 (=H chain) |
| | chain-TVAAPS linker-GS-DOM9-155-154 | 13 (=L chain) |
| | dAb | |
| | L chain = Anti-human IL-13 mAb light | |
| | chain | |
| 586H-ASTKG-154 | H chain = Anti-human IL-13 mAb heavy | 30 (=H chain) |
| | chain-GS-ASTKGPT linker-GS-DOM9- | 13 (=L chain) |
| | 155-154 dAb | |
| | L chain = Anti-human IL-13 mAb light | |
| | chain | |
| 586H-EPKSC-154 | H chain = Anti-human IL-13 mAb heavy | 34 (=H chain) |
| | chain-GS-EPKSCDKTHTCPPCP linker- | 13 (=L chain) |
| | GS-DOM9-155-154 dAb | |
| | L chain = Anti-human IL-13 mAb light | |
| | chain | |
| 586H-ELQLE-154 | H chain = Anti-human IL-13 mAb heavy | 38 (=H chain) |
| | chain-GS-ELQLEESCAEAQDGELDG | 13 (=L chain) |
| | linker-GS-DOM9-155-154 dAb | |
| | L chain = Anti-human IL-13 mAb light | |
| | chain | |
| 586H-210 | H chain = Anti-human IL-13 mAb heavy | 19 (=H chain) |
| | chain-GS-DOM9-112-210 dAb | 13 (=L chain) |
| | L chain = Anti-human IL-13 mAb light | |
| | chain | |
| 586H-G4S-210 | H chain = Anti-human IL-13 mAb heavy | 23 (=H chain) |
| | chain-G4S linker-DOM9-112-210 dAb | 13 (=L chain) |
| | L chain = Anti-human IL-13 mAb light | |
| | chain | |
| 586H-TVAAPS-210 | H chain = Anti-human IL-13 mAb heavy | 27 (=H chain) |
| | chain-TVAAPS linker-GS-DOM9-112-210 | 13 (=L chain) |
| | dAb | |
| | L chain = Anti-human IL-13 mAb light | |
| | chain | |
| 586H-ASTKG-210 | H chain = Anti-human IL-13 mAb heavy | 31 (=H chain) |
| | chain-GS-ASTKGPT linker-GS-DOM9- | 13 (=L chain) |
| | 112-210 dAb | |
| | L chain = Anti-human IL-13 mAb light | |
| | chain | |
| 586H-EPKSC-210 | H chain = Anti-human IL-13 mAb heavy | 35 (=H chain) |
| | chain-GS-EPKSCDKTHTCPPCP linker- | 13 (=L chain) |
| | GS-DOM9-112-210 dAb | |
| | L chain = Anti-human IL-13 mAb light | |
| | chain | |
| 586H-ELQLE-210 | H chain = Anti-human IL-13 mAb heavy | 39 (=H chain) |
| | chain-GS-ELQLEESCAEAQDGELDG | 13 (=L chain) |
| | linker-GS-DOM9-112-210 dAb | |
| | L chain = Anti-human IL-13 mAb light | |
| | chain | |
| 586H | H chain = Anti-human IL-13 mAb heavy | 40 (=H chain) |
| | chain-GS- | 13 (=L chain) |
| | L chain = Anti-human IL-13 mAb light | |
| | chain | |
| 586H-ASTKG | H chain = Anti-human IL-13 mAb heavy | 41 (=H chain) |
| | chain-GS-ASTKGPT linker-GS | 13 (=L chain) |
| | L chain = Anti-human IL-13 mAb light | |
| | chain | |
| 586H-EPKSC | H chain = Anti-human IL-13 mAb heavy | 42 (=H chain) |
| | chain-GS-EPKSCDKTHTCPPCP linker- | 13 (=L chain) |
| | GS | |
| | L chain = Anti-human IL-13 mAb light | |
| | chain | |
| 586H-ELQLE | H chain = Anti-human IL-13 mAb heavy | 43 (=H chain) |
| | chain-GS-ELQLEESCAEAQDGELDG | 13 (=L chain) |
| | linker-GS | |
| | L chain = Anti-human IL-13 mAb light | |
| | chain | |

[0516] The mAbdAbs set out in table 2 were expressed in one or both of CHOK1 or CHOE1a cell supernatants, purified and analysed in a number of IL-13 and IL-4 activity assays.

TABLE 2

| | | Sequence ID |
|---|---|---|
| Name | Description | No. |
| 586H-TVAAPS-25 | H chain = Anti-human IL-13 mAb heavy chain- | 24 (=H chain) |
| | TVAAPS linker-GS-DOM9-155-25 dAb | 13 (=L chain) |
| | L chain = Anti-human IL-13 mAb light chain | |
| 586H-TVAAPS-154 | H chain = Anti-human IL-13 mAb heavy chain- | 26 (=H chain) |
| | TVAAPS linker-GS-DOM9-155-154 dAb | 13 (=L chain) |
| | L chain = Anti-human IL-13 mAb light chain | |
| 586H-TVAAPS-210 | H chain = Anti-human IL-13 mAb heavy chain- | 27 (=H chain) |
| | TVAAPS linker-GS-DOM9-112-210 dAb | 13 (=L chain) |
| | L chain = Anti-human IL-13 mAb light chain | |

### 1.3 Anti-IL4 mAb-Anti-IL13dAbs

[0517] Bispecific anti-IL4 mAb-anti-IL13dAbs were constructed as described above. A number of different linkers were used to join the anti-IL13 domain antibody to the monoclonal antibody. Some constructs had no linker.

[0518] Note that a BamHI cloning site (which codes for amino acid residues G and S) was used to clone the linkers and dAbs either to CH3 of the mAb heavy chain or to CK of the mAb light chain. Thus in addition to the given linker sequence, additional G and S amino acid residues are present between the linker sequence and the domain antibody for both heavy chain and light chain expression constructs or between CH3 and the linker sequence in some but not all heavy chain expression constructs. However, when the G4S linker was placed between the mAb and dAb in the mAbdAb format, the BamHI cloning site was already present (due to the G and S amino acid residues inherent within the G4S linker sequence) and thus additional G and S amino acid residues were not present between CH3 or CK and the domain antibody in the constructs using this linker. When no linker sequence was between used n the mAb and dAb in the mAbdAb format, the BamHI cloning site (and hence the G and S amino acid residues) was still present between CH3 or CK and the domain antibody. Full details on the amino acid sequences of mAbdAb heavy and light chains are set out in table 3.

[0519] The mAbdAbs set out in table 3 were expressed transiently in CHOK1 cell supernatants. Following mAbdAb quantification these mAbdAb containing supernatants were analysed for activity in IL-13 and IL-4 binding ELISAs.

TABLE 3

| | | Sequence ID |
|---|---|---|
| Name | Description | No. |
| PascoH-474 | H chain = Pascolizumab heavy chain-GS- | 48 (=H chain) |
| | DOM10-53-474 dAb | 15 (=L chain) |
| | L chain = Pascolizumab light chain | |
| PascoH-G4S-474 | H chain = Pascolizumab heavy chain-G4S | 49 (=H chain) |
| | linker-DOM10-53-474 dAb | 15 (=L chain) |
| | L chain = Pascolizumab light chain | |
| PascoH-TVAAPS-474 | H chain = Pascolizumab heavy chain-TVAAPS | 50 (=H chain) |
| | linker-GS-DOM10-53-474 dAb | 15 (=L chain) |
| | L chain = Pascolizumab light chain | |
| PascoH-ASTKG-474 | H chain = Pascolizumab heavy chain-GS- | 51 (=H chain) |
| | ASTKGPT linker-GS-DOM10-53-474 dAb | 15 (=L chain) |
| | L chain = Pascolizumab light chain | |
| PascoH-EPKSC-474 | H chain = Pascolizumab heavy chain-GS- | 52 (=H chain) |
| | EPKSCDKTHTCPPCP linker-GS-DOM10-53- | 15 (=L chain) |
| | 474 dAb | |
| | L chain = Pascolizumab light chain | |
| PascoH-ELQLE-474 | H chain = Pascolizumab heavy chain-GS- | 53 (=H chain) |
| | ELQLEESCAEAQDGELDG linker-GS-DOM10- | 15 (=L chain) |
| | 53-474 dAb | |
| | L chain = Pascolizumab light chain | |
| PascoL-474 | H chain = Pascolizumab heavy chain | 14 (=H chain) |
| | L chain = Pascolizumab light chain-GS-DOM10- | 54 (=L chain) |
| | 53-474 dAb | |
| PascoL-G4S-474 | H chain = Pascolizumab heavy chain | 14 (=H chain) |
| | L chain = Pascolizumab light chain-G4S linker- | 55 (=L chain) |
| | DOM10-53-474 dAb | |
| PascoL-TVAAPS-474 | H chain = Pascolizumab heavy chain | 14 (=H chain) |
| | L chain = Pascolizumab light chain-TVAAPS | 56 (=L chain) |
| | linker-GS-DOM10-53-474 dAb | |
| PascoL-ASTKG-474 | H chain = Pascolizumab heavy chain | 14 (=H chain) |
| | L chain = Pascolizumab light chain-ASTKGPT | 57 (=L chain) |
| | linker-GS-DOM10-53-474 dAb | |
| PascoL-EPKSC-474 | H chain = Pascolizumab heavy chain | 14 (=H chain) |
| | L chain = Pascolizumab light chain- | 58 (=L chain) |
| | EPKSCDKTHTCPPCP linker-GS-DOM10-53- | |
| | 474 dAb | |
| PascoL-ELQLE-474 | H chain = Pascolizumab heavy chain | 14 (=H chain) |
| | L chain = Pascolizumab light chain- | 59 (=L chain) |
| | ELQLEESCAEAQDGELDG linker-GS-DOM10- | |
| | 53-474 dAb | |

[0520] The mAbdAbs set out in Table 4 were expressed in one or more of CHOK1, CHOE1a or HEK293-6E cells.

TABLE 4

| | | Sequence ID |
|---|---|---|
| Name | Description | No. |
| PascoH- | H chain = Pascolizumab heavy chain-G4S | 49 (=H chain) |
| G4S-474 | linker-DOM10-53-474 dAb | 15 (=L chain) |
| | L chain = Pascolizumab light chain | |
| PascoH- | H chain = Pascolizumab heavy chain-GS- | 48 (=H chain) |
| 474 | DOM10-53-474 dAb | 15 (=L chain) |
| | L chain = Pascolizumab light chain | |
| PascoL- | H chain = Pascolizumab heavy chain | 14 (=H chain) |
| G4S-474 | L chain = Pascolizumab light chain-G4S | 55 (=L chain) |
| | linker-DOM10-53-474 dAb | |
| PascoHL- | H chain = Pascolizumab heavy chain-G4S | 49 (=H chain) |
| G4S-474 | linker-DOM10-53-474 dAb | 55 (=L chain) |
| | L chain = Pascolizumab light chain-G4S | |
| | linker-DOM10-53-474 dAb | |

### 1.4 Sequence ID Numbers for Monoclonal Antibodies, Domain Antibodies and Linkers

[0521] Sequence IDs numbers for the monoclonal antibodies (mAb), domain antibodies (dAb) and linkers used to generate the mAbdAbs are shown below in table 5.

TABLE 5

| Name | Specificity | Sequence ID | |
|---|---|---|---|
| Anti-human IL-13 monoclonal antibody | Human IL-13 | 12 | (H chain) |
| (also known as 586) | | 13 | (L chain) |
| Anti-human IL-4 monoclonal antibody | Human IL-4 | 14 | (H chain) |
| (also known as Pascolizumab) | | 15 | (L chain) |
| DOM10-53-474 domain antibody | Human IL-13 | 5 | |
| Anti-human IL-13 monoclonal antibody | Human IL-13 | 161 | (H chain) |
| (also known as 656) | | 156 | (L chain) |
| DOM9-112-210 domain antibody | Human IL-4 | 4 | |
| DOM10-53-616 domain antibody | Human IL-13 | 148 | |
| DOM9-155-25 domain antibody | Human IL-4 | 1 | |
| DOM9-155-147 domain antibody | Human IL-4 | 2 | |
| DOM9-155-154 domain antibody | Human IL-4 | 3 | |
| ASTKGPS linker sequence | Derived from human IgG1 | 9 | |
| | H chain (VH-CH1) | | |
| ASTKGPT linker sequence | Derived from human IgG1 | 8 | |
| | H chain (VH-CH1), where | | |
| | the last amino acid residue | | |
| | in the native sequence (S) | | |
| | has been substituted for T | | |
| EPKSCDKTHTCPPCP linker sequence | Derived from human IgG1 | 10 | |
| | H chain (CH1-CH2) | | |
| TVAAPS linker sequence | Derived from human K L | 7 | |
| | chain (VL-CK) | | |
| ELQLEESCAEAQDGELDG linker | Derived from human IgG1 | 11 | |
| sequence | CH3 tether | | |
| GGGGS linker sequence | A published linker | 6 | |
| | sequence | | |

[0522] Mature human IL-13 amino acid sequence (without signal sequence) is given in SEQ ID NO: 63.

[0523] Mature human IL-4 amino acid sequence (without signal sequence) is given in SEQ ID NO: 62.

### 1.5 Expression and Purification of mAbdAbs

[0524] The mAbdAb expression constructs described in Example 1 were transfected into one or more of CHOK1 cells, CHOE1a cells or HEK293-6E cells, expressed at small (approximately 3 mls) or medium (approximately 50 mls to 100 mls) or large (approximately 1 litre) scale and then some of the constructs were purified using immobilised Protein A columns and quantified by reading absorbance at 280 nm.

### 1.6 Size Exclusion Chromatography Analyses of Purified mAbdAbs

[0525] A number of mAbdAbs were analysed by size exclusion chromatography (SEC) and sodium dodecyl sulphate polyacrylamide gel electrophoresis (SDS PAGE). Representative data for some of these molecules (PascoH-G4S-474, PascoL-G4S-474, PascoH-474 and PascoHL-G4S-474.) are shown in FIGS. 9, 10, 11 and 12 respectively. Representative data showing SEC and SDS Page analysis for these molecules with the ‘GS’ motif removed are shown in FIGS. 90-98.

[0526] In some cases SEC was used to further purify these molecules to remove aggregates.

### Example 2

### Binding of mAbdAbs to Human IL-13 and Human IL-4 by ELISA

### 2.1 Binding of anti-IL13 mAb-anti-IL4dAbs to IL-13 and IL-4

[0527] mAbdAb supernatants, were tested for binding to human IL-13 in a direct binding ELISA (as described in method 1). These data are shown in FIG. 13.

[0528] FIG. 13 shows that all of these anti-IL13 mAb-anti-IL4dAbs bound IL-13. The binding activity of these mAbdAbs was also approximately equivalent (within 2-fold to 3-fold) to purified anti-human IL13 mAb alone, which was included in this assay as a positive control for IL-13 binding and in order to directly compare to the mAbdAbs. Purified anti-human IL4 mAb (Pascolizumab) was included as a negative control for IL-13 binding.

[0529] These molecules were also tested for binding to human IL-4 in a direct binding ELISA (as described in method 2). These data are shown in FIG. 14.

[0530] FIG. 14 shows that all of these anti-IL13 mAb-anti-IL4dAbs bound IL-4, but some variation in IL-4 binding activity was observed. No binding to IL-4 was observed when no anti-IL4 dAb was present in the mAbdAb construct. Purified anti-human IL13 mAb was also included as a negative control for binding to IL-4. Note that the anti-IL-4 dAbs alone were not tested in this assay as the dAbs are not detected by the secondary detection antibody; instead, purified anti-human IL4 mAb (Pascolizumab) was used as a positive control to demonstrate IL-4 binding in this assay.

[0531] Purified samples of mAbdAbs, were also tested for binding to human IL-13 in a direct binding ELISA (as described in method 1). These data are shown in FIG. 15.

[0532] These purified anti-IL13 mAb-anti-IL4dAbs bound IL-13. The binding activity of these mAbdAbs for IL-13 was equivalent to that of purified anti-human IL13 mAb alone. An isotype-matched mAb (with specificity for an irrelevant antigen) was also included as a negative control for binding to IL-13 in this assay.

[0533] These purified mAbdAbs were also tested for binding to human IL-4 in a direct binding ELISA (as described in method 2). These data are shown in FIG. 16.

[0534] All of these anti-IL13 mAb-anti-IL4dAbs bound IL-4. Note that the anti-IL-4 dAbs alone were not tested in this assay as the dAbs are not detected by the secondary detection antibody; instead, purified anti-human IL4 mAb (Pascolizumab) was used as a positive control to demonstrate IL-4 binding in this assay. An isotype-matched mAb (with specificity for an irrelevant antigen) was also included as a negative control for binding to IL-4 in this assay.

### 2.2 Binding of Anti-IL4 mAb-Anti-IL13dAbs to IL-13 and IL-4

[0535] mAbdAb supernatants were tested for binding to human IL-4 in a direct binding ELISA (as described in method 2). These data are shown in FIG. 17 (some samples were prepared and tested in duplicate and this has been annotated as sample 1 and sample 2).

[0536] FIG. 17 shows that all of these mAbdAbs bound IL-4. Purified anti-human IL4 mAb alone (Pascolizumab) was included in this assay but did not generate a binding curve as an error was made when diluting this mAb for use in the assay (Pascolizumab has been used successfully in all other subsequent IL-4 binding ELISAs). Purified anti-human IL13 mAb was included as a negative control for IL-4 binding.

[0537] The same mAbdAb supernatants were also tested for binding to human IL-13 in a direct binding ELISA (as described in method 1). These data are shown in FIG. 18 (some samples were prepared and tested in duplicate and this has been annotated as sample 1 and sample 2).

[0538] FIG. 18 shows that all of these anti-IL4 mAb-anti-IL13dAbs bound IL-13. Purified anti-human IL13 mAb alone was included in this assay but did not generate a binding curve as an error was made when diluting this mAb for use in the assay (purified anti-human IL13 mAb has been used successfully in all other subsequent IL-13 binding ELISAs). Purified anti-IL4 mAb (Pascolizumab) was included as a negative control for binding to IL-13. Note that the anti-IL-13 dAb alone (DOM10-53-474) was not tested in this assay as this dAb is not detected by the secondary detection antibody.

[0539] The purified anti-IL4 mAb-anti-IL13dAbs, ‘PascoH-G4S-474’, ‘PascoH-474’, ‘PascoL-G4S-474’ and ‘PascoHL-G4S-474’, were also tested for binding to human IL-4 in a direct binding ELISA (as described in method 2). These data are shown in FIG. 19.

[0540] These purified anti-IL4 mAb-anti-IL13dAbs bound IL-4. The binding activity of these mAbdAbs was approximately equivalent (within 2-fold) to purified anti-IL4 mAb alone (Pascolizumab). An isotype-matched mAb (with specificity for an irrelevant antigen) was also included as a negative control for binding to IL-4 in this assay.

[0541] These same purified anti-IL4 mAb-anti-IL13dAbs, PascoH-G4S-474, PascoH-474, PascoL-G4S-474 and PascoHL-G4S-474, were also tested for binding to human IL-13 in a direct binding ELISA (as described in method 1). These data are shown in FIG. 20A.

[0542] These purified anti-IL4 mAb-anti-IL13dAbs bound IL-13. An isotype-matched mAb (with specificity for an irrelevant antigen) was also included as a negative control for binding to IL-13 in this assay. Note that the anti-IL-13 dAb alone (DOM10-53-474) was not tested in this assay as the dAb is not detected by the secondary detection antibody; instead, the anti-human IL13 mAb was used as a positive control to demonstrate IL-13 binding in this assay.

[0543] Purified PascoH-474, PascoH-TVAAPS-474, PascoH-ASTKG-474 and PascoH-ELQLE-474 were also tested for binding to cynomolgus IL-13 in a direct binding ELISA, as described in method 17 (PascoH-474 GS removed and PascoH-TVAAPS-474 GS removed were also included in this assay, the construction of these molecules is described in Example 18). A graph showing representative data is shown in FIG. 20B.

[0544] Purified PascoH-474, PascoH-TVAAPS-474, PascoH-ASTKG-474 and PascoH-ELQLE-474 all bound cynomolgus IL-13. Purified anti-human IL4 mAb alone (Pascolizumab) was included in this assay as a negative control for binding to IL-13. Purified anti-human IL13 mAb was included as a positive control for cynomolgus IL-13 binding. Note that the anti-IL-13 dAb alone (DOM10-53-474) was not tested in this assay as the dAb is not detected by the secondary detection antibody; instead, the anti-human IL13 mAb was used as a positive control to demonstrate IL-13 binding in this assay.

### Example 3

### Binding of mAbdAbs to Human IL-13 and Human IL-4 by Surface Plasmon Resonance (Biacore™)

### 3.1 Binding of Anti-IL13 mAb-Anti-IL4dAbs to IL-13 and IL-4 by BIAcore™

[0545] mAbdAbs (in CHO cell supernatants, prepared as described in section 1.5) were tested for binding to human IL-13 using BIAcore™ at 25° C. (as described in method 4). For this data set, two IL-13 concentration curves (100 nM and 1 nM) were assessed and relative response capture levels of between 1000 and 1300 (approximately) were achieved for each mAbdAb construct. Due to the limited number of concentrations of IL-13 used, the data generated are more suitable for ranking of constructs rather than exact kinetic measurements. These data are shown in Table 6.

TABLE 6

| Antibody | Binding affinity KD (nM) |
|---|---|
| 586H-25 | 0.39 |
| 586H-G4S-25 | 0.41 |
| 586H-TVAAPS-25 | 0.5 |
| 586H-ASTKG-25 | 0.54 |
| 586H-EPKSC-25 | 0.55 |
| 586H-ELQLE-25 | 0.42 |
| 586H-147 | 0.46 |
| 586H-G4S-147 | 0.45 |
| 586H-TVAAPS-147 | 0.56 |
| 586H-ASTKG-147 | 0.44 |
| 586H-EPKSC-147 | 0.46 |
| 586H-ELQLE-147 | 0.51 |
| 586H-154 | 0.46 |
| 586H-G4S-154 | 0.37 |
| 586H-TVAAPS-154 | 0.56 |
| 586H-ASTKG-154 | 0.44 |
| 586H-EPKSC-154 | 0.42 |
| 586H-ELQLE-154 | 0.44 |
| 586H-210 | 0.44 |
| 586H-G4S-210 | 0.42 |
| 586H-TVAAPS-210 | 0.4 |
| 586H-ASTKG-210 | 0.4 |
| 586H-EPKSC-210 | 0.43 |
| 586H-ELQLE-210 | 0.43 |
| 586H | 0.44 |
| 586H-ASTKG | 0.32 |
| 586H-ELQLE | 0.47 |
| 586H-EPKSC | 0.45 |
| Anti-human IL-13 mAb (purified) | 0.38 |
| Pascolizumab (purified) | no binding |

[0546] All of these anti-IL 3 mAb-anti-IL4dAbs bound IL-13 with similar binding affinities which were approximately equivalent to the binding affinity of purified anti-human IL13 mAb alone. These data suggested that the addition of linkers and/or anti-IL4 dAbs to the heavy chain of the anti-IL13 mAb, did not affect the IL-13 binding affinity of the mAb component within these mAbdAb constructs.

[0547] These mAbdAbs were also tested for binding to human IL-4 using BIAcore™ at 25° C. (as described in method 5). These data are shown in Table 7. For this data set, four IL-4 concentration curves (512, 128, 32 and 8 nM) were assessed and approximate relative response capture levels for each mAbdAb tested are indicated in the table. Note that the anti-IL-4 dAbs alone were not tested in this assay as the dAbs cannot be captured onto the Protein A or anti-human IgG coated CM5 chip; instead, the anti-human IL4 mAb (Pascolizumab) was used as a positive control to demonstrate IL-4 binding in this assay.

TABLE 7

| | | | | Binding |
|---|---|---|---|---|
| | Capture | On rate | Off rate | affinity |
| Antibody | Level | (ka, Ms⁻¹) | (kd, s⁻¹) | KD (nM) |
| 586H-25 | 864 | 6.13e3 | 4.11e−4 | 67 |
| 586H-G4S-25 | 1818 | 6.3e3 | 9.54e−4 | 151 |
| 586H-TVAAPS-25 | 673 | 1.27e5 | 1.2e−4 | 0.95 |
| 586H-ASTKG-25 | 809 | 5.4e5 | 1.20e−3 | 21.8 |
| 586H-EPKSC-25 | 748 | 4.79e4 | 1.42e−3 | 29.6 |
| 586H-ELQLE-25 | 603 | 1.26e6 | 1.63e−6 | 0.001* |
| 586H-147 | 1095 | 3.42e3 | 1.18e−3 | 344.8 |
| 586H-G4S-147 | 1200 | 4.21e3 | 4.57e−4 | 108.5 |
| 586H-TVAAPS-147 | 433 | 6.62e4 | 6.69e−7 | 0.011** |
| 586H-ASTKG-147 | 1248 | 3.67e4 | 6.9e−4 | 18.8 |
| 586H-EPKSC-147 | 878 | 2.54e4 | 6.71e−4 | 26.4 |
| 586H-ELQLE-147 | 676 | 7.01e5 | 1.52e−5 | 0.027* |
| 586H-154 | 436 | 6.1e3 | 1.74e−3 | 285 |
| 586H-G4S-154 | 1437 | 5.00e3 | 6.85e−4 | 137.8 |
| 586H-TVAAPS-154 | 1530 | 6.44e4 | 1.15e−7 | 0.002** |
| 586H-ASTKG-154 | 1373 | 3.26e4 | 2.84e−4 | 8.7 |
| 586H-EPKSC-154 | 794 | 3.03e4 | 5.7e−4 | 18.8 |
| 586H-ELQLE-154 | 795 | 1.25e6 | 3.57e−6 | 0.003* |
| 586H-210 | 1520 | not | not | — |
| | | determined | determined | |
| 586H-G4S-210 | 1448 | not | not | — |
| | | determined | determined | |
| 586H-TVAAPS-210 | 1693 | not | not | — |
| | | determined | determined | |
| 586H-ASTKG-210 | 1768 | not | not | — |
| | | determined | determined | |
| 586H-EPKSC-210 | 1729 | not | not | — |
| | | determined | determined | |
| 586H-ELQLE-210 | 1350 | not | not | — |
| | | determined | determined | |
| 586H | 1500 | no binding | no binding | — |
| 586H-ASTKG | 1615 | no binding | no binding | — |
| 586H-ELQLE | 343 | no binding | no binding | — |
| 586H-EPKSC | 1416 | no binding | no binding | — |
| Pascolizumab | 1092 | 2.04e6 | 1.23e−4 | 0.060 |
| (purified) | | | | |

[0548] Caveats were observed for some of the above data sets. Poor curve fits were observed for some data sets (*), the actual binding affinity values that have been determined for these data should therefore be treated with caution. Positive dissociation was seen for some curves (**), the actual binding affinity values that have been determined for these data should therefore be treated with caution. In addition, BIAcore™ was unable (ie. not sensitive enough) to determine on and off rates for all mAbdAb constructs containing the DOM9-112-210 dAb, due to the exceptionally tight binding of these mAbdAbs to IL-4. Determination of binding kinetics for these mAbdAbs for IL-4 was further hampered by observed positive dissociation effects. These data are shown in FIG. 21.

[0549] Similar data was obtained in an additional experiment. These data are shown in FIG. 22.

[0550] These 2 independent data sets indicated that all of the anti-IL13mAb-anti-IL4dAbs bound IL-4, but the binding affinities varied depending on the linker used to join the anti-IL4 dAb to the anti-IL13 mAb heavy chain. In this experiment, the presence of a linker was found to enhance the binding affinity for IL-4 of the anti-IL4 dAb component (when placed on the heavy chain) in the mAbdAb format. For example the molecules having TVAAPS or ELQLEESCAEAQDGELDG linkers appear to be more potent binders. No binding to IL-4 was observed when no anti-IL4 dAb was present in the mAbdAb construct. It was not possible to measure the binding affinity of the 586-linker-210 mAbdAbs for IL-4, due to the fact that the DOM9-112-210 component of these mAbdAbs binds very tightly and hence the off-rate is too small to determine using BIAcore™.

[0551] Purified anti-IL13 mAb-anti-IL4dAbs were also tested for binding to human IL-13 and human IL-4 using BIAcore™ at 25° C. (as described in methods 4 and 5). These data are shown in Table 8.

TABLE 8

| | Binding affinity, KD (nM) | |
|---|---|---|
| Construct | Human IL-13 | Human IL-4 |
| 586H-TVAAPS-25 | 0.38 | 1.1 |
| 586H-TVAAPS-154 | 0.41 | 0.49 |
| 586H-TVAAPS-210 | 0.38 | very tight binder |
| | | (unable to determine KD due to |
| | | positive dissociation effects and |
| | | sensitivity level of BIAcore ™ |
| | | technique) |
| Anti-human IL-13 | 0.43 | — |
| mAb (purified) | | |
| Pascolizumab | — | 0.03 |
| (purified) | | |

[0552] 586H-TVAAPS-25, 586H-TVAAPS-154 and 586H-TVAAPS-210 all bound IL-13 with similar binding affinities and this was approximately equivalent to the binding affinity of purified anti-human IL13 mAb alone. 586H-TVAAPS-25, 586H-TVAAPS-154 and 586H-TVAAPS-210 all bound IL-4. It was not possible to measure the binding affinity of 586-TVAAPS-210 for IL-4, due to the fact that the DOM9-112-210 component of this mAbdAb bound very tightly and hence the off-rate was too small to determine using BIAcore™. Note that the anti-IL-4 dAbs alone (DOM9-155-25, DOM9-155-154 and DOM9-112-210) were not tested in this assay format as the dAbs cannot be captured onto the Protein A or anti-human IgG coated CM5 chip; instead, the anti-human IL4 mAb (Pascolizumab) was used as a positive control to demonstrate IL-4 binding in this assay.

### 3.2 Binding of Anti-IL4 mAb-Anti-IL13dAbs to IL-4 and IL-13 by BIAcore™

[0553] mAbdAbs (in CHO cell supernatants prepared as described in section 1.5) were tested for binding to human IL-4 using BIAcore™ at 25° C. (as described in method 5). These data are shown in Table 9 (some samples were prepared and tested in duplicate—this has been annotated as sample 1 and sample 2). For this data set, four IL-4 concentrations curves (100 nM, 10 nM, 1 nM and 0.1 nM) were assessed and approximate relative response capture levels for each mAbdAb tested are indicated in the table. An isotype-matched mAb (with specificity for an irrelevant antigen) was also included as a negative control for binding to IL-4 in this assay.

TABLE 9

| | | | | |
|---|---|---|---|---|
| | Capture | On rate | Off rate | Binding affinity |
| Antibody | Level | (ka, Ms⁻¹) | (kd, s⁻¹) | KD (nM) |

Experiment 1

| | | | | |
|---|---|---|---|---|
| PascoH-G4S-474 | ~500 | 5.1e6 | 8.6e−5 | 0.02 |
| PascoH-TVAAPS-474 | ~500 | 5.5e6 | 9.7e−5 | 0.02 |
| PascoH-474 | ~500 | 4.8e6 | 9.4e−5 | 0.02 |
| PascoH-ASTKG-474 | ~500 | 5.3e6 | 8.6e−5 | 0.02 |
| PascoH-ELQLE-474 | ~500 | 5.1e6 | 1.1e−4 | 0.02 |
| PascoH-EPKSC-474 | ~500 | 4.9e6 | 9.8e−5 | 0.02 |
| Pascolizumab (purified) | ~700 | 5.3e6 | 1.6e−4 | 0.03 |

Experiment 2

| | | | | |
|---|---|---|---|---|
| PascoL-G4S-474 (sample 1) | 1871 | 2.14e6 | 1.35e−4 | 0.063 |
| PascoL-G4S-474 (sample 2) | 1921 | 2.13e6 | 1.11e−4 | 0.052 |
| PascoL-TVAAPS-474 (sample 1) | 2796 | 2.48e6 | 2.12e−4 | 0.085 |
| PascoL-TVAAPS-474 (sample 2) | 3250 | 3.04e6 | 2.79e−4 | 0.092 |
| PascoL-474 (sample 1) | 3254 | 2.8e6 | 1.84e−4 | 0.065 |
| PascoL-474 (sample 2) | 2756 | 2.53e6 | 1.22e−4 | 0.048 |
| PascoL-ASTKG-474 (sample 1) | 3037 | 2.95e6 | 1.21e−4 | 0.041 |
| PascoL-ASTKG-474 (sample 2) | 3784 | 2.54e6 | 1.52e−4 | 0.060 |
| PascoL-EPKSC-474 (sample 1) | 3238 | 1.86e6 | 2.58e−4 | 0.139 |
| PascoL-EPKSC-474 (sample 2) | 3276 | 2.51e6 | 3.18e−4 | 0.127 |
| Pascolizumab (purified) | 1152 | 2.04e6 | 1.23e−4 | 0.060 |
| Negative control mAb | 2976 | no binding | no binding | — |

[0554] All of the anti-IL4 mAb-anti-IL13dAbs tested bound IL-4 with similar binding affinities and this was approximately equivalent to the binding affinity of the anti-human IL4 mAb alone (Pascolizumab). PascoL-EPKSC-474 bound IL-4 approximately 2-fold less potently than Pascolizumab. These data suggested that the addition of linkers and the anti-IL13 dAb to either the heavy chain or the light chain of Pascolizumab, did not overtly affect the IL-4 binding affinity of the mAb component within the mAbdAb construct.

[0555] These mAbdAbs were also tested for binding to human IL-13 using BIAcore™ at 25° C. (as described in method 4). These data are shown in Table 10 (some samples were prepared and tested in duplicate—this has been annotated as sample 1 and sample 2). For this data set, four IL-13 concentrations curves (128 nM, 32 nM, 8 nM and 2 nM) were assessed and approximate relative response capture levels for each mAbdAb tested are indicated in the table.

TABLE 10

| | | | | |
|---|---|---|---|---|
| | | | | Binding |
| | Capture | On rate | Off rate | affinity |
| Antibody | Level | (ka, Ms⁻¹) | (kd, s⁻¹) | KD (nM) |

Experiment 1

| | | | | |
|---|---|---|---|---|
| PascoH-474 | ~500 | 3.6e5 | 3.1e−4 | 0.84 |
| PascoH-G4S-474 | ~500 | 3.9e5 | 2.6e−4 | 0.67 |
| PascoH-TVAAPS-474 | ~500 | 4.5e5 | 4.2e−4 | 0.94 |
| PascoH-ASTKG-474 | ~500 | 3.1e5 | 4.6e−4 | 1.5 |
| PascoH-ELQLE-474 | ~500 | 3.4e5 | 6.2e−4 | 1.8 |
| PascoH-EPKSC-474 | ~500 | 3.5e5 | 4.0e−4 | 1.1 |
| Anti-human IL-13 mAb | ~650 | 8.6e5 | 4.9e−4 | 0.57 |
| (purified) | | | | |

Experiment 2

| | | | | |
|---|---|---|---|---|
| PascoL-474 (sample 1) | 3254 | 2.86e5 | 3.82e−4 | 1.34 |
| PascoL-474 (sample 2) | 2756 | 3.12e5 | 3.86e−4 | 1.24 |
| PascoL-G4S-474 (sample 1) | 1871 | 5.63e5 | 4.25e−4 | 0.756 |
| PascoL-G4S-474 (sample 2) | 1921 | 5.59e5 | 3.47e−4 | 0.621 |
| PascoL-TVAAPS-474 | 2796 | 7.42e5 | 2.58e−4 | 0.348 |
| (sample 1) | | | | |
| PascoL-TVAAPS-474 | 3250 | 6.22e5 | 1.71e−4 | 0.275 |
| (sample 2) | | | | |
| PascoL-ASTKG-474 | 3037 | 5.26e5 | 2.38e−4 | 0.451 |
| (sample 1) | | | | |
| PascoL-ASTKG-474 | 3784 | 5.38e5 | 3.20e−4 | 0.595 |
| (sample 2) | | | | |
| PascoL-EPKSC-474 | 3238 | 4.17e5 | 3.34e−4 | 0.801 |
| (sample 1) | | | | |
| PascoL-EPKSC-474 | 3276 | 3.51e5 | 2.86e−4 | 0.815 |
| (sample 2) | | | | |
| Anti-human IL-13 mAb | 1373 | 9.12e4 | 6.11e−4 | 0.67 |
| (purified) | | | | |
| Pascolizumab (purified) | 1152 | no binding | no | — |
| | | | binding | |
| Negative control mAb | 2976 | no binding | no | — |
| | | | binding | |

[0556] Binding affinity data for constructs tested in experiment 2 are also shown in FIG. 23.

[0557] All of the anti-IL4 mAb-anti-IL13dAbs bound IL-13. In most cases the presence of a linker did not appear to enhance the binding affinity for IL-13 of the anti-IL13 dAb component when placed on the heavy chain of the anti-IL4 mAb. However, the presence of a linker did appear to enhance the binding affinity for IL-13 of the anti-IL13 dAb component when placed on the light chain of the anti-IL4 mAb. PascoL-TVAAPS-474 appeared to have the most potent IL-13 binding affinity in this experiment.

[0558] Note that the anti-IL-13 dAb alone (DOM10-53-474) was not tested in this assay as the dAb cannot be captured onto the Protein A or anti-human IgG coated CM5 chip; instead, purified anti-human IL13 mAb was used as a positive control to demonstrate IL-13 binding in this assay. An isotype-matched mAb (with specificity for an irrelevant antigen) was also included as a negative control for binding to IL-13 in this assay.

[0559] Purified anti-IL4 mAb-anti-IL13dAbs were also tested for binding to human IL-4 and human IL-13 using BIAcore™ at 25° C. (as described in methods 4 and 5). These data are shown in Table 11.

TABLE 11

| | Binding affinity, KD (nM) | |
|---|---|---|
| Construct | Human IL-4 | Human IL-13 |
| PascoH-G4S-474 | 0.036 | 0.58 |
| PascoH-474 | 0.037 | 0.71 |
| PascoL-G4S-474 | 0.028 | 1.2 |
| PascoHL-G4S-474 | 0.035 | 0.87 |
| Anti-human IL-13 mAb (purified) | — | 0.41 |
| Pascolizumab (purified) | 0.037 | — |

[0560] In this experiment PascoH-G4S-474, PascoH-474, PascoL-G4S-474 and PascoHL-G4S-474 all bound IL-4 with similar binding affinities and this was approximately equivalent to the binding affinity of the anti-human IL4 mAb alone (Pascolizumab). They also all bound IL-13. Note that the anti-IL-13 dAb alone (DOM10-53-474) was not tested in this assay as the dAb cannot be captured onto the Protein A or anti-human IgG coated CM5 chip; instead, the anti-human IL13 mAb was used as a positive control to demonstrate IL-13 binding in this assay.

### 3.3 Stoichiometry of Binding of IL-13 and IL-4 to the Anti-IL4 mAb-Anti-IL13dAbs Using BIAcore™

[0561] Purified anti-IL4 mAb-anti-IL13dAbs were evaluated for stoichiometry of binding for IL-13 and IL-4 using BIAcore™ (as described in method 7). These data are shown in Table 12.

TABLE 12

| | Stoichiometry | |
|---|---|---|
| Construct | Human IL-4 | Human IL-13 |
| PascoL-G4S-474 | 1.8 | 1.8 |
| PascoH-G4S-474 | 1.8 | 1.9 |
| Pasco-474 | 1.8 | 1.9 |
| PascoHL-G4S-474 | 1.7 | 3.5 |
| Anti-human IL-13 mAb (purified) | — | 1.8 |
| Pascolizumab (purified) | 1.8 | — |

[0562] PascoH-G4S-474, PascoH-474 and PascoL-G4S-474 were able to bind to nearly two molecules of IL-13 and two molecules of IL-4. PascoHL-G4S-474 was able to bind nearly two molecules of IL-4 and nearly four molecules of IL-13. These data indicated that the constructs tested could be fully occupied by the expected number of IL-13 or IL-4 molecules.

### Example 4

### Neutralisation Potency of mAbdAbs in IL-13 and IL-4 Bioassays

### 4.1 Anti-IL13 mAb-Anti-IL4dAbs

[0563] Purified anti-IL13 mAb-anti-IL4dAbs were tested for neutralisation of human IL-13 in a TF-1 cell bioassay (as described in method 8). These data are shown in FIG. 24.

[0564] Purified anti-IL13 mAb-anti-IL4dAbs, 586H-TVAAPS-25, 586H-TVAAPS-154 and 586H-TVAAPS-210, fully neutralised the bioactivity of IL-13 in a TF-1 cell bioassay. The neutralisation potencies of these mAbdAbs were within 2-fold of purified anti-human IL-13 mAb alone. The purified anti-human IL-4 mAb (Pascolizumab) and purified anti-IL4 dAbs (DOM9-155-25, DOM9-155-154 or DOM9-112-210) were included as negative controls for neutralisation of IL-13 in this assay.

[0565] The purified anti-IL13 mAb-anti-IL4dAbs, 586H-TVAAPS-25, 586H-TVAAPS-154 and 586H-TVAAPS-210, were also tested for neutralisation of human IL-4 in a TF-1 cell bioassay (as described in method 9). These data are shown in FIG. 25.

[0566] 586H-TVAAPS-210 fully neutralised the bioactivity of IL-4 in this TF-1 cell bioassay. The neutralisation potency of this mAbdAb was within 2-fold of purified anti-human IL-4 dAb alone (DOM9-112-210). 586H-TVAAPS-25 and 586H-TVAAPS-154 did not neutralise the bioactivity of IL-4 and this was in contrast to the purified anti-human IL-4 dAbs alone (DOM9-155-25 and DOM9-155-154). As demonstrated by BIAcore™, purified 586H-TVAAPS-25 and 586H-TVAAPS-154 had 1.1 nM and 0.49 nM binding affinities (respectively) for IL-4. IL-4 binds the IL-4 receptor very tightly (binding affinities of approximately 50 pM have been reported in literature publications) and thus the observation that both 586H-TVAAPS-25 or 586H-TVAAPS-154 were unable to effectively neutralise the bioactivity of IL-4 in the TF-1 cell bioassay maybe a result of the relative lower affinity of these mAbdAbs for IL-4 compared to the potency of IL-4 for the IL-4 receptor.

[0567] Purified anti-human IL-4 mAb (Pascolizumab) was included as a positive control for neutralisation of IL-4 in this bioassay. Purified anti-human IL-13 mAb was included as a negative control for neutralisation of IL-4 in this bioassay.

### 4.2 Anti-IL4 mAb-Anti-IL13dAbs

[0568] The purified anti-IL4 mAb-anti-IL13dAbs, PascoH-G4S-474, PascoH-474, PascoL-G4S-474 and PascoHL-G4S-474, were tested for neutralisation of human IL-4 in a TF-1 cell bioassay (as described in method 9). These data are shown in FIG. 26.

[0569] Purified anti-IL4 mAb-anti-IL13dAbs, PascoH-G4S-474, PascoH-474, PascoL-G4S-474 and PascoHL-G4S-474, fully neutralised the bioactivity of IL-4 in a TF-1 cell bioassay. The neutralisation potencies of these mAbdAbs were approximately equivalent to that of purified anti-human IL4 mAb alone (Pascolizumab), Purified anti-human IL-13 mAb, purified DOM10-53-474 dAb and a dAb with specificity for an irrelevant antigen (negative control dAb) were also included as negative controls for neutralisation of IL-4 in this bioassay.

[0570] The purified anti-IL4 mAb-anti-IL13dAbs, PascoH-G4S-474, PascoH-474, PascoL-G4S-474 and PascoHL-G4S-474, were tested for neutralisation of human IL-13 in a TF-1 cell bioassay (as described in method 8). These data are shown in FIG. 27.

[0571] Purified anti-IL4 mAb-anti-IL13dAbs, PascoH-G4S-474, PascoH-474, PascoL-G4S-474 and PascoHL-G4S-474, fully neutralised the bioactivity of IL-13 in a TF-1 cell bioassay. The neutralisation potencies of these mAbdAbs were within 3-fold of purified anti-IL13 dAb alone (DOM10-53-474). Purified anti-human IL-13 mAb was also included as a positive control for IL-13 neutralisation in this bioassay. A dAb with specificity for an irrelevant antigen (negative control dAb) and purified anti-human IL4 mAb alone (Pascolizumab) were also included as negative controls for neutralisation of IL-4 in this bioassay.

[0572] The purified anti-IL4 mAb-anti-IL13dAbs, PascoH-G4S-474, PascoH-474, PascoL-G4S-474 and PascoHL-G4S-474, were also tested for simultaneous neutralisation of human IL-4 and human IL-13 in a dual neutralisation TF-1 cell bioassay (as described in method 10). These data are shown in FIG. 28.

[0573] Purified anti-IL4 mAb-anti-IL13dAbs, PascoH-G4S-474, PascoH-474, PascoL-G4S-474 and PascoHL-G4S-474, fully neutralised the bioactivity of both IL-4 and IL-13 in a dual neutralisation TF-1 cell bioassay. The neutralisation potencies of these mAbdAbs were approximately equivalent to that of a combination of purified anti-human IL4 mAb (Pascolizumab) and purified anti-IL13 dAb (DOM10-53-474). Purified anti-human IL-13 mAb alone, purified anti-human IL-4 mAb alone (Pascolizumab) and the anti-human IL-13 dAb (DOM10-53-474) alone (which were included as negative controls) did not fully neutralise the bioactivity of both IL-4 and IL-13 in this dual IL-4 and IL-13 neutralisation bioassay.

### Example 5

### SEC-MALLS Analysis of dAbs

[0574] Antigen-specific dAbs were characterized for their solution state by SEC-MALLS (size-exclusion chromatography—multi-angle laser light scattering) and the results are shown in Table 13: the DOM10-53-474, dAb exists as a monomer in solution whilst all DOM9 dAbs (DOM9-112-210, DOM9-155-25, DOM9-155-147 and DOM9-155-154) can form stable dimers (and in some instances tetramers).

### 5.1. Preparation of the Proteins

[0575] Samples were purified and dialysed into appropriate buffer e.g. PBS. Samples were filtered after dialysis and the concentration determined (0.43 mg/ml DOM-155-25), (1.35 mg/ml DOM9-155-147) and 1.4 mg/ml DOM9-155-159). DOM10-53-474 and DOM9-112-210 were adjusted to 1 mg/ml.

[0576] BSA was purchased from Sigma and used without further purification.

### 5.2. Size-Exclusion Chromatography and Detector Set-Up

[0577] Shimadzu LC-20AD Prominence HPLC system with an autosampler (SIL-20A) and SPD-20A Prominence UV/Vis detector was connected to Wyatt Mini Dawn Treos (MALLS, multi-angle laser light scattering detector) and Wyatt Optilab rEX DR1 (differential refractive index) detector. The detectors were connected in the following order—LS-UV-R1. Both R1 and LS instruments operated at a wavelength of 488 nm. TSK2000 (Tosoh corporation)) column were used (silica-based HPLC column) with mobile phase of 50 mM phosphate buffer (without salt), or 1×PBS, both at pH7.4. The flow rate used is 0.5 or 1 ml/min, the time of the run was adjusted to reflect different flow rates (45 or 23 min) and was not expected to have significant impact onto separation of the molecules. Proteins were prepared in buffer to a concentration of 1 mg/ml and injection volume was 100 ul.

### 5.3. Detector Calibration

[0578] The light-scattering detector was calibrated with toluene according to manufacturer's instructions.

### 5.4. Detector Calibration with BSA

[0579] The UV detector output and R1 detector output were connected to the light scattering instrument so that the signals from all three detectors could be simultaneously collected with the Wyatt ASTRA software. Several injections of BSA in a mobile phase of PBS (1 ml/min) are run over a Tosoh TSK2000 column with UV, LS and R1 signals collected by the Wyatt software. The traces are then analysed using ASTRA software, and the signals are normalised aligned and corrected for band broadening following manufacturer's instructions. Calibration constants are then averaged and input into the template which is used for future sample runs.

### 5.5. Absolute Molar Mass Calculations

[0580] 100 ul of each sample were injected onto appropriate pre-equilibrated column.

[0581] After SEC column the sample passes through 3 on-line detectors—UV, MALLS (multi-angle laser light scattering) and DR1 (differential refractive index) allowing absolute molar mass determination. The dilution that takes place on the column is about 10 fold, and the concentration at which in-solution state was determined as appropriate.

[0582] The basis of the calculations in ASTRA as well as of the Zimm plot technique, which is often implemented in a batch sample mode is the equation from Zimm [J. Chem. Phys. 16, 1093-1099 (1948)]:

$$\frac{{R}_{θ}}{{K}^{*} x} = MP ( θ ) - 2 {A}_{2} {cM}^{2} {P}^{2} ( θ ) \qquad ( Eq . 1 )$$

where
[0583] c is the mass concentration of the solute molecules in the solvent (g/mL)
[0584] M is the weight average molar mass (g/mol)
[0585] A₂ is the second virial coefficient (mol mL/g²)
[0586] K*=4p²n₀²(dn/dc)²l₀⁻⁴N_{A}⁻¹ is an optical constant where no is the refractive index of the solvent at the incident radiation (vacuum) wavelength, l₀ is the incident radiation (vacuum) wavelength, expressed in nanometers, N_{A} is Avogadro's number, equal to 6.022×10²³ mol⁻¹, and dn/dc is the differential refractive index increment of the solvent-solute solution with respect to a change in solute concentration, expressed in mL/g (this factor must be measured independently using a dRI detector).
[0587] P(q) is the theoretically-derived form factor, approximately equal to 1−2μ² [symbol] ² [symbol] /31+ . . . , where μ=(4π/λ)sin(θ/2), and <r²> is the mean square radius. P(q) is a function of the molecules' z-average size, shape, and structure.
[0588] R_{q} is the excess Rayleigh ratio (cm⁻¹)

[0589] This equation assumes vertically polarized incident light and is valid to order c².

[0590] To perform calculations with the Zimm fit method, which is a fit to R_{q}/K*c vs. sin²(q/2), we need to expand the reciprocal of Eq. 1 first order in c:

[0591] To perform calculations with the Zimm fit method, which is a fit to

[0592] Rq/K*c vs. sin 2(q/2), we need to expand the reciprocal of Eq. 1 to first order in c:

$$\frac{{K}^{*} c}{{R}_{θ}} = \frac{1}{MP ( θ )} + 2 {A}_{2} c \qquad Eq . 2$$

[0593] The appropriate results in this case are

$$\begin{matrix}M = {( \frac{{K}^{*} c}{{R}_{θ}} - 2 {A}_{2} c )}^{- 1} \\ and & Eq . 3 \\ ( {r}^{2} ) = \frac{3 {m}_{0} {λ}^{2} M}{16 {π}^{2}} & Eq . 4\end{matrix}$$

where

m₀≡d[K²c/R_{θ}]/d[sin²(θ/2)]_{θ→0} Eq. 5

[0594] The calculations are performed automatically by ASTRA software, resulting in a plot with molar mass determined for each of the slices [Astra manual].

[0595] Molar mass obtained from the plot for each of the peaks observed on chromatogram was compared with expected molecular mass of a single unit of the protein. This provides a basis to form conclusions about in-solution state of the protein. Representative data is shown in Table 13.

TABLE 13
Summary

| dAb | SEC-MALLS | MW | Column & mobile phase |
|---|---|---|---|
| DOM10-53-474 | monomer | 14 kDa | TSK2000, PBS, pH 7.4, 0.5 ml/min |
| DOM9-112-210 | dimer | 30 kDa | TSK2000, PBS, pH 7.4, 0.5 ml/min |
| DOM9-155-25 | dimer | 28 kDa | TSK2000, 50 mM, phosphate buffer |
| | | | pH 7.4, 1 ml/min |
| DOM9-155-147 | dimer-tetramer | 26-51 kDa | TSK2000, 50 mM phosphate buffer, |
| | equilibrium | | pH 7.4, 1 ml/min |
| DOM9-155-159 | dimer | 28 kDa | TSK2000, 50 mM phosphate Buffer, |
| | | | pH 7.4, 1 ml/min |

### DOM10-53-474

[0596] Single peak with the average molar mass defined as ˜14 kDa indicating a monomeric state in solution, shown in FIG. 29

### DOM9-112-210

[0597] Single peak with the molar mass defined as 30 kDa indicating a dimeric state in solution, shown in FIG. 30

### DOM9-155-25

[0598] Nice symmetrical peak but running at the buffer front. The mid part of the peak has been used for molar mass determination (see figure below with all three signals overlaid). Molar mass is 28 kDa which represents a dimeric dAb, shown in FIG. 31.

[0599] Overlay of all three signals (FIG. 32)

### DOM9-155-147

[0600] The main peak is assigned with molar mass of 26 kDa over the right part of the peak and increasing steeply over the left part of the peak up to 53 kDa. The peak most likely represents a dimer and a smaller fraction of tetramer in a rapid equilibrium. A much smaller peak eluting at 7.6 min, represents tetrameric protein with molar mass of 51 kDa (FIG. 33).

### DOM9-155-159

[0601] The protein runs as a single symmetric peak, with average molar mass assigned at ˜28 kDa indicating a dimeric state in solution (FIG. 34)

### Control for MW Assignment by SEC-MALLS: BSA

[0602] Each BSA run for each of the experiments set out above resulted in the expected MW, e.g. 2 peaks with molar mass of 67 and 145 kDa (monomer and dimer) (FIG. 35).

### Example 6

### Generation of Trispecific mAbdAbs

[0603] Trispecific mAb-dAbs were constructed either by generating VH and VL sequences by assembly PCR which were then cloned into existing mAbdAb expression vectors or by sub-cloning existing VH and VL regions from mAb expression vectors into existing mAbdAb expression vectors, such that when expressed, the trispecific mAbdAb has dAbs attached to both the C-terminus of the heavy and light chains.

[0604] A linker sequence was used to join the domain antibody to heavy chain CH3 or light chain CK. A schematic diagram of a trispecific mAbdAb molecule is shown in FIG. 36 (the mAb heavy chain is drawn in grey; the mAb light chain is drawn in white; the dAbs are drawn in black).

[0605] A schematic diagram illustrating the construction of a trispecific mAbdAb heavy chain (top illustration) and a trispecific mAbdAb light chain (bottom illustration) is shown

[chemical structure]

below

[0606] For the heavy chain the term ‘V_{H}’ is the monoclonal antibody variable heavy chain sequence; ‘CH1, CH2 and CH3’ are human IgG1 heavy chain constant region sequences; ‘linker’ is the sequence of the specific linker region used; ‘dAb’ is the domain antibody sequence. For the light chain: ‘V_{L}’ is the monoclonal antibody variable light chain sequence; ‘CK’ is the human light chain constant region sequence; ‘linker’ is the sequence of the specific linker region used; ‘dAb’ is the domain antibody sequence.

[0607] A mammalian amino acid signal sequence (as shown in SEQ ID NO: 64) was used in the generation of these constructs.

### 6.1 Trispecific Anti-IL18 mAb-Anti-IL4dAb-Anti-IL13dAb

[0608] A trispecific anti-IL18 mAb-anti-IL4dAb-anti-IL13dAb (also known as IL18 mAb-210-474) was constructed by grafting a sequence encoding an anti-human IL-4 domain antibody (DOM9-112-210) onto a sequence encoding the heavy chain and a sequence encoding an anti-IL13 domain antibody (DOM10-53-474) onto a sequence encoding the light chain of an anti-human IL-18 humanised monoclonal antibody. A G4S linker was used to join the anti-IL4 domain antibody onto the heavy chain of the monoclonal antibody. A G4S linker was also used to join the anti-IL13 domain antibody onto the light chain of the monoclonal antibody.

[0609] IL18 mAb-210-474 was expressed transiently in CHOK1 cell supernatants, and following quantification of IL18 mAb-210-474 in the cell supernatant, analysed in a number of IL-18, IL-4 and IL-13 binding assays.

| Name | Description | Sequence ID No. |
|---|---|---|
| IL18mAb-210-474 | H chain = Anti-human IL-18 | 69 (=H chain) |
| | mAb heavy | 70 (=L chain) |
| | chain-G4S | |
| | linker-DOM9-112-210 dAb | |
| | L chain = Anti-human IL-18 | |
| | mAb light chain-G4S | |
| | linker-DOM10-53-474 dAb | |

### 6.2 Trispecific Anti-IL5 mAb-Anti-IL4dAb-Anti-IL13dAb

[0610] A trispecific anti-IL5 mAb-anti-IL4dAb-anti-IL13dAb (also known as Mepo-210-474) was constructed by grafting a sequence encoding an anti-human IL-4 domain antibody DOM9-112-210 (SEQ ID NO: 4) onto a sequence encoding the heavy chain of an anti-human IL-5 humanised monoclonal antibody (SEQ ID NO: 65), and grafting a sequence encoding an anti-IL13 domain antibody DOM10-53-474 (SEQ ID NO: 5) onto a sequence encoding the light chain of an anti-human IL-5 humanised monoclonal antibody (SEQ ID NO: 66). A G4S linker was used to join the anti-IL4 domain antibody onto the heavy chain of the monoclonal antibody. A G4S linker was also used to join the anti-IL13 domain antibody onto the light chain of the monoclonal antibody.

[0611] This mAbdAb was expressed transiently in CHOK1 and HEK293-6E cell supernatants, and following quantification in the cell supernatant, analysed in a number of IL-4, IL-5 and IL-13 binding assays.

| Name | Description | Sequence ID No. |
|---|---|---|
| Mepo-210-474 | H chain = Anti-human IL-5 mAb | 71 (=H chain) |
| | heavy chain-G4S | 72 (=L chain) |
| | linker-DOM9-112-210 dAb | |
| | L chain = Anti-human | |
| | IL-5 mAb light chain-G4S | |
| | linker-DOM10-53-474 dAb | |

### 6.3 Sequences of Monoclonal Antibodies, Domain Antibodies and Linkers

[0612] The sequences for the monoclonal antibodies, domain antibodies and linkers used to generate the trispecific mAbdAbs (or used as control reagents in the following exemplifications) are shown below in table 14.

TABLE 14

| Name | Specificity | Sequence ID |
|---|---|---|
| DOM9-112-210 domain antibody | Human IL-4 | 4 |
| DOM10-53-474 domain antibody | Human IL-13 | 5 |
| GGGGS linker sequence | | 6 |
| Pascolizumab (Anti-human IL-4 | Human IL-4 | 14 (=H chain) |
| monoclonal antibody) | | 15 (=L chain) |
| Mepolizumab (Anti-human IL-5 | Human IL-5 | 65 (=H chain) |
| monoclonal antibody) | | 66 (=L chain) |
| Anti-human IL-13 (humanised) | Human IL-13 | 12 (=H chain) |
| monoclonal antibody | | 13 (=L chain) |
| Anti-human IL-18 (humanised) | Human IL-18 | 67 (=H chain) |
| monoclonal antibody | | 68 (=L chain) |

[0613] Mature human IL-4 amino acid sequence (without signal sequence) is given in SEQ ID NO: 62.

[0614] Mature human IL-13 amino acid sequence (without signal sequence) is given in SEQ ID NO: 63.

### 6.4 Expression and Purification of Trispecific mAbdAbs

[0615] DNA sequences encoding trispecific mAbdAb molecules were cloned into mammalian expression vectors (Rln, Rld or pTT) using standard molecular biology techniques. The trispecific mAbdAb expression constructs were transiently transfected into one or both of CHOK1 or HEK293-6E cells, expressed at small scale (3 mls to 150 mls). The expression procedures used to generate the trispecfic mAbdAbs were the same as those routinely used to express and monoclonal antibodies.

[0616] Some of the constructs were purified using immobilised Protein A columns and quantified by reading absorbance at 280 nm.

### Example 7

### Binding of Trispecific mAbdAbs to Human IL-4, Human IL-13 and Human IL-18 by ELISA

### 7.1 Binding of IL-18 mAb-210-474 to IL-4, IL-13 and IL-18 by ELISA

[0617] Trispecific mAbdAb IL18 mAb-210-474 (supernatants) prepared as described in Example 6 (SEQ ID NO: 69 and 70), was tested for binding to human IL-18, human IL-13 and human IL-4 in direct binding ELISAs (as described in methods 1, 2 and 3) and these data are shown in FIGS. 37, 38 and 39 respectively (IL18 mAb-210-474 was prepared and tested a number of times and this has been annotated in the figures as sample 1, sample 2, sample 3, etc).

[0618] These figures show that IL18 mAb-210-474 bound IL-4, IL-13 and IL-18 by ELISA. Purified anti-human IL18 mAb was included in the IL-18 binding ELISA as a positive control for IL-18 binding. The anti-IL-4 dAb (DOM9-112-210) was not tested in the IL-4 binding ELISA as this dAb is not detected by the secondary detection antibody; instead, purified anti-human IL4 mAb (Pascolizumab) was used as a positive control to demonstrate IL-4 binding in this ELISA. The anti-IL-13 dAb (DOM10-53-474) was not tested in the IL-13 binding ELISA as this dAb is not detected by the secondary detection antibody; instead, purified anti-human IL-13 mAb was included as a positive control to demonstrate IL-13 binding in this ELISA. As shown in the figures, negative control mAbs to an irrelevant antigen were included in each binding ELISA.

[0619] In each ELISA the binding curve for IL18 mAb-210-474 sample 5 sits apart from the binding curves for the other IL18 mAb-210-474 samples. The reason for this is unknown however, it maybe due to a quantification issue in the human IgG quantification ELISA for this particular IL18 mAb-210-474 sample 5.

### 7.2 Binding of Mepo-210-474 to IL-4 and IL-13 by ELISA

[0620] Trispecific mAbdAbs Mepo-210-474 (supernatant) prepared as described in section 1 (sequence ID numbers 71 and 72), were tested for binding to human IL-13 and human IL-4 in direct binding ELISAs (as described in methods 1 and 2 respectively) and these data are shown in FIGS. 40 and 41 respectively (Mepo-210-474 was prepared and tested in quadruplicate and this has been annotated as sample 1, sample 2, sample 3 and sample 4).

[0621] These figures illustrate that Mepo-210-474 bound IL-4 and IL-13 by ELISA. The anti-IL-4 dAb (DOM9-112-210) was not tested in the IL-4 binding ELISA as this dAb is not detected by the secondary detection antibody; instead, purified anti-human IL4 mAb (Pascolizumab) was used as a positive control to demonstrate IL-4 binding in this ELISA. The anti-IL-13 dAb (DOM10-53-474) was not tested in the IL-13 binding ELISA as this dAb is not detected by the secondary detection antibody; instead, purified anti-human IL-13 mAb was included as a positive control to demonstrate IL-13 binding in this ELISA. As shown in FIGS. 40 and 41, negative control mAbs to an irrelevant antigen were included in each binding ELISA.

[0622] Mepo-210-474 sample 1 and sample 2 were prepared in one transient transfection experiment and Mepo-210-474 sample 3 and sample 4 were prepared in another separate transient transfection experiment. All four samples bound IL-13 and IL-4 in IL-13 and IL-4 binding ELISAs. However, the reason for the different binding profiles of samples 1 and 2 verses samples 3 and 4 is unknown, but may reflect a difference in the quality of the mAbdAb (in the supernatant) generated in each transfection experiment.

### Example 8

### Binding of Trispecific mAbdAbs to Human IL-4, Human IL-5, Human IL-13 and Human IL-18 by Surface Plasmon Resonance (BIAcore™)

### 8.1 Binding of IL-18 mAb-210-474 to IL-4, IL-13 and IL-18 by BIAcore™

[0623] Trispecific mAbdAb IL18 mAb-210-474 (supernatants) prepared as described in Example 6.1 (SEQ ID NO: 69 and 70), was tested for binding to human IL-4, human IL-13 and human IL-18 using BIAcore™ at 25° C. (as described in methods 4, 5 and 6 respectively). Capture levels were within the range of approximately 400 to 850 Response Units. Three concentrations of each analyte were tested (256, 32 and 4 nM). The resulting data are shown in Table 15 (samples were prepared and tested in triplicate, this has been annotated as sample 1, sample 2 and sample 3).

TABLE 15

| | | | |
|---|---|---|---|
| | | | Binding affinity, KD |
| Construct | On rate (ka) | Off rate (kd) | (nM) |

Binding to IL-18

| | | | |
|---|---|---|---|
| IL18mAb-210-474 (sample 1) | 2.1e6 | 2.3e−5 | 0.011 |
| IL18mAb-210-474 (sample 2) | 2.1e6 | 2.8e−5 | 0.014 |
| IL18mAb-210-474 (sample 3) | 2.1e6 | 2.9e−5 | 0.014 |
| Anti-human IL-18 mAb (purified) | 1.9e6 | 6.8e−5 | 0.035 |

Binding to IL-13

| | | | |
|---|---|---|---|
| IL18mAb-210-474 (sample 1) | 5.8e5 | 5.7e−4 | 0.99 |
| IL18mAb-210-474 (sample 2) | 6.2e5 | 6.1e−4 | 0.99 |
| IL18mAb-210-474 (sample 3) | 7.4e5 | 7.4e−4 | 1.0 |
| Anti-human IL-13 mAb (purified) | 1.2e6 | 5.0e−4 | 0.41 |

Binding to IL-4

| | | | |
|---|---|---|---|
| IL18mAb-210-474 (sample 1) | — | — | very tight binder* |
| IL18mAb-210-474 (sample 2) | — | — | very tight binder* |
| IL18mAb-210-474 (sample 3) | — | — | very tight binder* |
| Pascolizumab (purified) | 4.6e6 | 1.7e−4 | 0.037 |

*unable to determine KD due to positive dissociation effects and sensitivity level of BIAcore ™ technique

[0624] The trispecific mAbdab bound IL-4, IL-13 and IL-18 using BIAcore™. The binding affinity of the mAbdAb for IL-18 was approximately equivalent to that of purified anti-human IL18 mAb alone, which was included in this assay as a positive control for IL-18 binding and in order to directly compare to the binding affinity of the mAbdab. It was not possible to determine the absolute binding affinity of the mAbdab for IL-4, due to the fact that the DOM9-112-210 component of this trispecific mAbdAb bound very tightly to IL-4 and hence the off-rate was too small to determine using BIAcore™. The anti-IL-4 dAb alone (DOM9-112-210) was not tested in this assay as this dAb cannot be captured onto the Protein A or anti-human IgG coated CM5 chip; instead, the anti-human IL4 mAb (Pascolizumab) was included as a positive control to demonstrate IL-4 binding in this assay. The anti-IL-13 dAb alone (DOM10-53-474) was not tested in this assay as this dAb cannot be captured onto the Protein A or anti-human IgG coated CM5 chip; instead, the anti-human IL13 mAb was included as a positive control to demonstrate IL-13 binding in this assay.

### 8.2 Binding of Mepo-210-474 to IL-4, IL-5 and IL-13 by BIAcore™

[0625] Trispecific mAbdAb Mepo-210-474 (supernatants) prepared as described in Example 6.2 (SEQ ID NO: 71 and 72), was tested for binding to human IL-4, human IL-5 and human IL-13 using BIAcore™ at 25° C. (as described in methods 5, 11 and 4 respectively). Capture levels were within the range of approximately 550 to 900 Response Units. For IL-4 and IL-13 binding five concentrations of each analyte were tested (256, 64, 16, 4 and 1 nM). For IL-5 binding four concentrations of each analyte were tested (64, 16, 4 and 1 nM). The resulting data are shown in Table 16.

TABLE 16

| | | | |
|---|---|---|---|
| | On rate | Off rate | Binding affinity, |
| Construct | (ka) | (kd) | KD (nM) |

Binding to IL-5

| | | | |
|---|---|---|---|
| Mepo-210-474 | 3.34e5 | 1.50e−4 | 0.45 |
| Mepolizumab (purified) | 3.78e4 | 1.30e−4 | 0.34 |

Binding to IL-13

| | | | |
|---|---|---|---|
| Mepo-210-474 | 6.38e5 | 1.03e−3 | 1.62 |
| Anti-human IL-13 mAb | 1.51e6 | 5.68e−4 | 0.38 |
| (purified) | | | |

Binding to IL-4

| | | | |
|---|---|---|---|
| Mepo-210-474 | — | — | very tight binder |
| | | | (unable to determine KD |
| | | | due to positive dissociation |
| | | | effects and sensitivity level |
| | | | of BIAcore ™ technique) |
| Pascolizumab (purified) | 6.26e6 | 1.43e−4 | 0.02 |

[0626] Mepo-210-474 bound IL-4, IL-5 and IL-13 using BIAcore™. The binding affinity of Mepo-210-474 for IL-5 was approximately equivalent to that of purified anti-human IL5 mAb (Mepolizumab) alone, which was included in this assay as a positive control for IL-5 binding and in order to directly compare to the binding affinity of Mepo-210-474. It was not possible to determine the absolute binding affinity of Mepo-210-474 for IL-4, due to the fact that the DOM9-112-210 component of this trispecific mAbdAb bound very tightly to IL-4 and hence the off-rate was too small to determine using BIAcore™. The anti-IL-4 dAb alone (DOM9-112-210) was not tested in this assay as this dAb cannot be captured onto the Protein A or anti-human IgG coated CM5 chip; instead, the anti-human IL4 mAb (Pascolizumab) was included as a positive control to demonstrate IL-4 binding in this assay. The anti-IL-13 dAb alone (DOM10-53-474) was not tested in this assay as this dAb cannot be captured onto the Protein A or anti-human IgG coated CM5 chip; instead, the anti-human IL13 mAb was included as a positive control to demonstrate IL-13 binding in this assay.

### Example 9

### Stoichiometry

### 9.1 Stoichiometry of Binding of IL-4, IL-13 and IL-18 to IL-18 mAb-210-474 Using BIAcore™

[0627] IL18 mAb-210-474 (in CHO cell supernatants prepared as described in section 1) (SEQ ID NO: 69 and 70), were evaluated for stoichiometry of binding for IL-4, IL-13 and IL-18 using BIAcore™ (as described in method 7). These data are shown in Table 17 (R-max is the saturated binding response and this is required to calculate the stoichiometry, as per the given formulae in method 7). The concentration of each of the cytokines was 500 nM. The injection position refers to the order in which each of the cytokines was added.

TABLE 17

| Cytokine | Injection position | R-max | Stoichiometry |
|---|---|---|---|
| IL-4 | 1st | 59 | 0.9 |
| IL-4 | 2nd | 56 | 0.9 |
| IL-4 | 3rd | 51 | 0.8 |
| IL-13 | 1st | 74 | 1.6 |
| IL-13 | 2nd | 77 | 1.7 |
| IL-13 | 3rd | 80 | 1.8 |
| IL-18 | 1st | 112 | 1.8 |
| IL-18 | 2nd | 113 | 1.8 |
| IL-18 | 3rd | 110 | 1.7 |

[0628] The stoichiometry data indicated that IL18 mAb-210-474 bound approximately two molecules of IL-18, two molecules of IL-13 and only one molecule of IL-4. The anti-IL4 dAb alone (DOM9-112-210) is known to be a dimer in solution state and is only able to bind one molecule of IL-4. It is therefore not unexpected that IL18 mAb-210-474 would bind only one molecule of IL-4. These data indicated that the molecules tested could be fully occupied by the expected number of IL-18, IL-13 and IL-4 molecules. The stoichiometry data also indicated that the order of capture of the cytokines appears to be independent of the order of addition of the cytokines.

### Example 10

### 10.1 Generation of a Dual Targeting Anti-TNF/Anti-EGFR mAbdAb

[0629] This dual targeting mAbdAb was constructed by fusion of a dAb to the C-terminus of the mAb heavy chain. The anti-TNF mAb heavy and light chain expression cassettes had been previously constructed. The restriction sites which were used for cloning are shown below (FIG. 42).

[0630] To introduce restriction sites for dAb insertion in the heavy chain, site directed mutagenesis was used to create SalI and HindIII cloning sites using the mAb heavy chain expression vector as a template. DNA coding an anti-EGFR dAb (DOM16-39-542) was then amplified by PCR (using primers coding SalI and HindIII ends) and inserted into the modified 3′ coding region, resulting in a linker of ‘STG’ (serine, threonine, glycine) between the mAb and the dAb.

[0631] Sequence verified clones (SEQ ID NO: 170 and 169) for light and heavy chains respectively) were selected and large scale were made using Qiagen Mega Prep Kit following the manufacturer's protocols. mAbdAbs were expressed in mammalian HEK293-6E cells using transient transfection techniques by co-transfection of light and heavy chains (SEQ ID NO: 73 and 74)

### 10.2 Purification and SEC Analysis of the Dual Targeting Anti-TNF/Anti-EGFR mAbdAb

[0632] The anti-TNF/anti-EGFR mAbdAb was purified from clarified expression supernatant using Protein-A affinity chromatography according to established protocols. Concentrations of purified samples were determined by spectrophotometry from measurements of light absorbance at 280 nm. SDS-PAGE analysis (FIG. 43) of the purified sample shows non-reduced sample running at ˜170 kDa whilst reduced sample shows two bands running at ˜25 and ˜60 kDa corresponding light chain and dAb-fused heavy chain respectively.

[0633] For size exclusion chromatography (SEC) analysis the anti-TNF/anti-EGFR mAbdAb was applied onto a Superdex-200 10/30 HR column (attached to an Akta Express FPLC system) pre-equilibrated and running in PBS at 0.5 ml/min. The SEC profile shows a single species running as a symmetrical peak (FIG. 44).

### 10.3 Binding Affinities of the Dual Targeting Anti-TNF/Anti-EGFR mAbdAb

[0634] Binding affinities to EGFR and TNF were determined as described in methods 13 and 14 respectively. Assay data were analysed using GraphPad Prism. Potency values were determined using a sigmoidal dose response curve and the data fitted using the best fit model. Anti-EGFR potency (FIG. 45) of this mAbdAb was calculated to be 39.1 nM whilst the control, an anti-EGFR mAb gave an EC50 value of 3.4 nM. In the anti-TNF bioassay (FIG. 46) the potency was of the mAbdAb was 3 pM (0.0028 nM) whilst an anti-TNF control mAb produced an EC50 of 104 pM. In conclusion, assay data shows that the construct of example 10, a dual targeting anti-TNF/anti-EGFR mAbdAb is potent against both antigens.

### 10.4 Rat PK of the Dual Targeting Anti-TNF/Anti-EGFR mAbdAb

[0635] This molecule was tested for its in vivo pharmacokinetic properties in the rat. The anti-TNF/anti-EGFR mAbdAb was administered i.v. to three rats, and serum samples collected over a period of 7 days (168 hours). The concentration of drug remaining at various time points post-dose was assessed by ELISA against both TNF & EGFR. Results are shown in FIG. 125.

[0636] The PK parameters confirmed that this molecule had a long half life, in the same region as that previously observed for unmodified adalimumab (125 hours). Further details are shown in Table 17.1

TABLE 17.1

| Assay | Half Life | Cmax | AUC (0-inf) | Clearance | % AUC |
|---|---|---|---|---|---|
| Antigen | (hr) | (ug/mL) | (hr * ug/mL) | (mL/hr/kg) | Extrapolated |
| TNF | 157.2 | 149.8 | 10301.3 | 0.5 | 40.6 |
| EGFR | 140.8 | 123.6 | 7986.7 | 0.7 | 35 |

### Example 11

### 11.1 Generation of a Dual Targeting Anti-TNF/Anti-VEGF mAbdAb

[0637] An anti-TNF/anti-VEGF mAbdAb was produced employing a similar strategy described for example 10. For construction of the heavy chain expression cassette, vector DNA encoding the heavy chain of example 10 was taken as a starting point. The anti-EGFR dAb was excised using the restriction enzymes SalI and HindIII. DOM15-26-593, an anti-VEGF dAb was amplified by PCR (using primers coding SalI and HindIII ends) and ligated into the vector backbone which previously had the anti-EGFR dAb excised using the same restriction sites, resulting in a linker of ‘STG’ (serine, threonine, glycine) between the mAb and the dAb.

[0638] Sequence verified clones (SEQ ID NO: 169 and 168 for light and heavy chains respectively) were selected and large scale DNA preparations were made and the anti-TNF/anti-VEGF mAbdAb was expressed in mammalian HEK293-6E cells using transient transfection techniques by co-transfection of light and heavy chains (SEQ ID NO: 73 and 75).

### 11.2 Purification and SEC Analysis of the Dual Targeting Anti-TNF/Anti-VEGF mAbdAb

[0639] The anti-TNF/anti-VEGF mAbdAb (designated DMS4000) was purified from clarified expression supernatant using Protein-A affinity chromatography according to established protocols. Concentrations of purified samples were determined by spectrophotometry from measurements of light absorbance at 280 nm. SDS-PAGE analysis (FIG. 47) of the purified sample shows non-reduced sample running at ˜170 kDa whilst reduced sample shows two bands running at ˜25 and ˜60 kDa corresponding light chain and dAb-fused heavy chain respectively.

[0640] For size exclusion chromatography (SEC) analysis the anti-TNF/anti-VEGF mAbdAb was applied onto a Superdex-200 10/30 HR column (attached to an Akta Express FPLC system) pre-equilibrated and running in PBS at 0.5 ml/min. The SEC profile shows a single species running as a symmetrical peak (FIG. 48).

### 11.3 Binding Affinities of the Dual Targeting Anti-TNF/Anti-VEGF mAbdAb

[0641] Binding affinities to VEGF and TNF were determined as described in methods 12 and 14 respectively. Assay data were analysed using GraphPad Prism. Potency values were determined using a sigmoidal dose response curve and the data fitted using the best fit model. Anti-VEGF potency (FIG. 49) of this mAbdAb was calculated to be 57 pM whilst the control, an anti-VEGF mAb gave an EC50 value of 366 pM. In the anti-TNF bioassay (FIG. 50) the potency was 10 pM whilst an anti-TNF control mAb produced an EC50 of 22 pM. In conclusion, assay data shows that the molecule of Example 11, a dual targeting anti-TNF/anti-VEGF mAbdAb is potent against both antigens.

### 11.4 Rat PK of the Dual Targeting Anti-TNF/Anti-VEGF mAbdAb

[0642] This molecule was tested for its in vivo pharmacokinetic properties in the rat. The anti-TNF/anti-VEGF mAbdAb was administered i.v. to three rats, and serum samples collected over a period of 10 days (240 hours). The concentration of drug remaining at various time points post-dose was assessed by ELISA against both TNF & VEGF. The results are shown in FIG. 126

[0643] The PK parameters confirmed that this molecule had in vivo pharmacokinetic properties that compared with those of unmodified adalimumab. The shorter observed t_{1/2}β for the VEGF component is not considered to be significant and may be an assay artefact. Further details are shown in Table 17.2

TABLE 17.2

| | Half Life | Cmax | AUC (0-inf) | Clearance | % AUC |
|---|---|---|---|---|---|
| Antigen | (hr) | (μg/mL) | (hr * μg/mL) | (mL/hr/kg) | Extrapolated |
| TNF | 180.1 | 89.9 | 7286.3 | 0.7 | 35.8 |
| VEGF | 94.2 | 102.8 | 4747.1 | 1.1 | 14.3 |

### 11.5 Generation of an Alternative Anti-TNF/Anti-VEGF mAbdAb

[0644] An alternative anti-TNF/anti-VEGF mAbdAb was constructed in a similar way to that described above in Example 11.1, using the same anti-TNF mAb linked to a VEGF dAb on the C-terminus of the heavy chain using an STG linker. The anti-VEGF dAb used in this case was DOM15-10-11. This molecule was expressed in mammalian HEK293-6E cells using transient transfection techniques by co-transfection of light and heavy chains (SEQ ID NO: 73 and 185). This molecule expressed to give a mAbdAb of similar expression levels to that described in Example 11.2, however when tested for potency in the same VEGF assay as described in Example 11.3 it was found to have undetectable levels of inhibition of VEGF binding to VEGF receptor in this assay.

### Example 12

### 12.1 Generation of a Dual Targeting Anti-VEGF/Anti-IL1R1 dAb-Extended IgG

[0645] Two dual targeting dAb-extended IgG molecules were constructed using standard molecular biology techniques following a strategy of insertion of Dummy V domain coding regions in between dAb and constant regions of both chains.

[0646] For the light chain, the anti-IL1R1 dAb DOM4-130-54 was previously cloned into an expression cassette with SalI and BsiWI sites (FIG. 51) to produce a dAb-Ck chain. To produce the dAb-extended IgG light chain, Dummy Vk region was amplified by PCR with primers coding BsiWI on both ends. Plasmid containing the dAb-Ck expression cassette was digested with BsiWI. BsiWI digested Dummy Vk domain was ligated into this to produce the dAb-extended IgG light chain, with a linker of ‘TVAAPS’ between the two variable domains.

[0647] An identical strategy was followed to produce the dAb-extended IgG heavy chain where the PCR amplified Dummy VH domain with NheI ends was ligated into an NheI digested dAb heavy chain in between the dAb DOM15-26 and CH1 (FIG. 51), with a linker of ‘ASTKGPS’ between the two variable domains.

[0648] This is designated DMS2090 and has the sequence set out in SEQ ID NO: 163 (DNA sequence SEQ ID NO: 162). This was paired with the light chain set out in SEQ ID NO: 77 (DNA sequence SEQ ID NO: 171).

[0649] A second heavy chain was constructed in the same way but using the dAb DOM15-26-593. This is designated DMS2091, and has the sequence set out in SEQ ID NO: 76 (DNA sequence SEQ ID NO: 172). This was paired with the light chain set out in SEQ ID NO: 77 (DNA sequence SEQ ID NO: 171).

[0650] Sequence verified clones were selected and large scale DNA preparations were made using Qiagen Maxi or Mega Prep Kits following the manufacturer's protocols. The resulting construct was expressed in mammalian cells using transient transfection techniques by co-transfection of light and heavy chains.

### 12.2 Purification and SEC Analysis of the Dual Targeting Anti-VEGF/Anti-IL1R1 mAbdAb

[0651] Both anti-IL1R1/anti-VEGF dAb-extended IgG molecules were purified from clarified expression supernatant using Protein-A affinity chromatography according to established protocols. Concentrations of purified samples were determined by spectrophotometry from measurements of light absorbance at 280 nm. SDS-PAGE analysis for DMS2090 is shown in FIG. 52, and for DMS2091 is shown in FIG. 53. Both purified samples show non-reduced samples running at 190 kDa whilst the reduced samples show two bands running at 35 and 60 kDa corresponding to dAb-extended light chain and heavy chains respectively.

[0652] For size exclusion chromatography (SEC) analysis the anti-VEGF/anti-IL1R1 dAb-extended-IgG was applied onto a Superdex-200 10/30 HR column (attached to an Akta Express FPLC system) pre-equilibrated and running in PBS at 0.5 ml/min. The SEC profiles for DMS2090 (FIG. 54) and DMS2091 (FIG. 55) both show a single species running as a symmetrical peak.

### 12.3 Binding Affinities of the Dual Targeting Anti-VEGF/Anti-IL1R1 mAbdAb

[0653] Binding affinities to VEGF and IL1R1 were determined as described in methods 12 and 15 respectively. Assay data were analysed using GraphPad Prism. Potency values were determined using a sigmoidal dose response curve and the data fitted using the best fit model. Anti-VEGF potency (FIG. 57) of DMS2090 was calculated to be 158.4 pM whilst the control, an anti-VEGF mAb gave an EC50 value of 689.2 pM. Anti-VEGF potency (FIG. 56) of DMS2091 was calculated to be 55 pM whilst the control, an anti-VEGF mAb gave an EC50 value of 766 pM.

[0654] In the anti-IL1R1 bioassay the potency of DMS2090 (FIG. 58) was 32 pM whilst an anti-ILl R1 control mAb produced an EC50 of 35 pM. The potency of DMS2091 (FIG. 59) was 17.47 pM whilst an anti-IL1-R1 control mAb produced an EC50 of 35.02 pM.

[0655] In conclusion, assay data shows that example 12, a dual targeting anti-IL1R1/anti-VEGF dAb-extended IgG is potent against both antigens.

### 12.4 Rat PK of the Dual Targeting Anti-VEGF/Anti-IL1R1 mAbdAb

[0656] This molecule was tested for its in vivo pharmacokinetic properties in the rat. The anti-IL1R1/anti-VEGF dAb-extended IgG A was administered i.v. to three rats, and serum samples collected over a period of 7 days (168 hours). The concentration of drug remaining at various time points post-dose was assessed by ELISA against both IL1R1 & VEGF. The results are shown in FIG. 127

[0657] The PK parameters are shown in Table 17.3

TABLE 17.3

| | | Half | | | Clearance | % AUC |
|---|---|---|---|---|---|---|
| | Assay | Life | Cmax | AUC (0-inf) | (mL/ | Extra- |
| Molecule | Antigen | (hr) | (ug/mL) | (hr * ug/mL) | hr/kg) | polated |
| DMS2090 | VEGF | 72.1 | 100.4 | 4811.6 | 1.1 | 19 |
| DMS2090 | IL-1R1 | 86.3 | 87.7 | 3467.4 | 1.6 | 23.7 |

### Example 13

### 13.1 Generation of a Triple Targeting Anti-TNF/Anti-VEGF/Anti-EGFR mAbdAb

[0658] A triple targeting mAb was constructed using standard molecular biology techniques and following a strategy of insertion of mAb V domain coding regions in between dAb and constant regions of both chains.

[0659] For the light chain, the anti-EGFR dAb DOM16-39-542 was previously cloned into an expression cassette with SalI and BsiWI sites (FIG. 15) to produce a dAb-Ck chain. To produce the mAbdAb light chain, the mAb VL region was amplified by PCR with primers coding BsiWI on both ends. Plasmid containing the dAb-Ck expression cassette was digested with BsiWI. BsiWI digested mAb VL domain was ligated into this to produce the mAbdAb light chain, resulting in a linker of ‘TVAAPS’ between the two variable domains.

[0660] An identical strategy was followed to produce the mAbdAb heavy chain where the PCR amplified mAb VH region with NheI ends was ligated into an NheI digested dAb heavy chain vector in between the dAb (DOM15-26) and CH1 (FIG. 60), resulting in a linker of ‘ASTKGPS’ between the two variable domains.

[0661] Sequence verified clones (amino acid SEQ ID NO: 78 and 79 for heavy and light chains respectively) were selected and large scale DNA preparations were made using Qiagen Mega Prep Kits following the manufacturer's protocols. mAbdAbs were expressed in mammalian cells using transient transfection techniques by co-transfection of light and heavy chains.

### 13.2 Purification of the Triple Targeting Anti-TNF/Anti-VEGF/Anti-EGFR mAbdAb

[0662] The anti-TNF/anti-VEGF/anti-EGFR mAbdAb was purified from clarified expression supernatant using Protein-A affinity chromatography according to established protocols. Concentrations of purified samples were determined by spectrophotometry from measurements of light absorbance at 280 nm. SDS-PAGE analysis (FIG. 61) of the purified sample shows non-reduced sample running at 190 kDa whilst reduced sample shows two bands running at 35 and 60 kDa corresponding to dAb-extended light chain and heavy chains respectively.

[0663] 13.3 Binding Affinities of the Triple Targeting Anti-TNF/Anti-VEGF/Anti-EGFR mAbdAb

[0664] Binding affinities to VEGF, EGFR and TNF were determined as described in methods 12, 13 and 14 respectively. Assay data were analysed using GraphPad Prism. Potency values were determined using a sigmoidal dose response curve and the data fitted using the best fit model. Anti-VEGF potency (FIG. 62) of this mAbdAb was calculated to be 1.885 mM whilst the control, an anti-VEGF mAb gave an EC50 value of 0.145 nM.

[0665] In the anti-TNF bioassay (FIG. 63) the potency was 87 pM whilst an anti-TNF control mAb produced an EC50 of 104 pM. In the anti-EGFR assay (FIG. 64) the triple targeting mAbdAb produced ˜20% inhibition at ˜300 nM. Whilst EC50 values were calculated for VEGF and TNF binding, for EGFR binding a full curve was not produced to calculate an EC50 value.

### Example 14

### IGF-1R/VEGF mAbdAb

### 14.1 Construction of IGF-1R/VEGF mAbdAb

[0666] Anti IGF-1R variable heavy and variable light gene sequences were originally built de novo from PCR of overlapping oligonucleotides. These regions were fused to human IgG1 or kappa constant regions in a mammalian expression vector using standard molecular biology techniques. The gene sequence for an anti VEGF domain antibody was likewise constructed by PCR using overlapping oligonucleotides and fused to the 3′ end of either the heavy or light chain genes of the anti IGF-1R components described above. The fusion incorporated either a two amino acid (GS) linker or an 8 amino acid (TVAAPSGS) linker between the antibody and the domain antibody components. Antibody heavy and light chains were also constructed without the domain antibody and linker sequences. Sequence verified clones were selected for large scale DNA preparations using Endofree Qiagen Maxiprep kit following the manufacturer's protocols.

[0667] In sequences SEQ ID NO: 108, 109, 111 and 112, the position of the linker sequence between the antibody and domain antibody is underlined. Alternative variants could be constructed by removing the linker entirely or by using different linkers. Examples of other suitable linkers are provided in SEQ ID NO: 6 and 8 to 11. Table 18 provides a list of the antibodies constructed and expressed.

TABLE 18
Antibodies constructed and tested

| | | | | | SEQ | SEQ | |
|---|---|---|---|---|---|---|---|
| | | | | | ID NO | ID NO | |
| | | | | | for | for | |
| | Alternative | | Domain | | heavy | light | Site of |
| Identifier | names | Antibody | antibody | Linker | chain | chain | fusion |
| BPC1603 | 381H | Anti-IGF- | Dom15- | TVAAPSGS | 108 | 113 | Heavy |
| | TVAAPSGS | 1R | 26-593 | | | | chain C |
| | 593, | antibody | anti-VEGF | | | | terminus |
| | DMS4019 | H0L0 | | | | | |
| BPC1604 | 381H GS | Anti-IGF- | Dom15- | GS | 109 | 113 | Heavy |
| | 593, | 1R | 26-593 | | | | chain C |
| | DMS4020 | antibody | anti-VEGF | | | | terminus |
| | | H0L0 | | | | | |
| BPC1605 | 381L | Anti-IGF- | Dom15- | TVAAPSGS | 110 | 111 | Light |
| | TVAAPSGS | 1R | 26-593 | | | | chain C |
| | 593, | antibody | anti-VEGF | | | | terminus |
| | DMS4021 | H0L0 | | | | | |
| BPC1606 | 381L GS 593, | Anti-IGF- | Dom15- | GS | 110 | 112 | Light |
| | DMS4022 | 1R | 26-593 | | | | chain C |
| | | antibody | anti-VEGF | | | | terminus |
| | | H0L0 | | | | | |

### Example 14.2

### Expression, Purification and SEC Profile of IGF-1R/VEGF mAbdAb

[0668] Combinations of the heavy and light chain vectors expressed in transient transfections of HEK293-6E. Briefly, 50 ml of HEK293-6E cells at 1.5×10⁶ cells/ml were transfected with 25 μg of heavy and 25 μg of light chain plasmid previously incubated with 293fectin reagent (Invitrogen #51-0031). Cells were placed in a shaking incubator at 37° C., 5% CO₂, and 95% relative humidity. After 24 hours, tryptone feeding media was added and the cells grown for a further 72 hours. Supernatant was harvested by centrifugation followed by filtration using a 0.22 μm filter. The expressed protein was purified using a Protein A sepharose column and dialysed into PBS. Purified protein was analysed by size exclusion chromatography (SEC) and is shown in FIG. 65.

[0669] An IGF-1R antibody (H0L0) was used as a comparator in the following assays. This molecule has the heavy chain sequence set out in SEQ ID NO: 110, and the light chain sequence set out in SEQ ID NO: 113.

[0670] Another mAbdAb with irrelevant specificity was used as a comparator in the following assays. This molecule has the heavy chain sequence set out in SEQ ID NO: 87, and the light chain sequence set out in SEQ ID NO: 13 and is designated BPC1601.

### Example 14.3

### IGF-1R Binding ELISA

[0671] A binding ELISA was carried out to test the binding of the purified anti-IGF-1R/VEGF mAbdAbs to IGF-1R. Briefly, ELISA plates coated with anti-polyhistidine (AbCam AB9108) at 1 μg/ml and blocked with blocking solution (4% BSA in Tris buffered saline) were loaded with 400 ng/ml recombinant human IGF-1R-his tag (R&D Systems 305-GR) in PBS. The plate was incubated for 1 hour at room temp before washing in TBS+0.05% Tween 20 (TBST). Various concentrations of the purified mAbdAbs were added as well as an anti IGF-1R monoclonal antibody (H0L0) and an irrelevant mAbdAb (BPC1601), diluted in blocking solution. The plate was incubated for 1 hour at room temperature before washing in TBST. Binding was detected by the addition of a peroxidase labelled anti human kappa light chain antibody (Sigma A7164) at a dilution of 1/1000 in blocking solution. The plate was incubated for 1 hour at room temp before washing in TBST. The plate was developed by addition of OPD substrate (Sigma P9187) and colour development stopped by addition of 3M H₂SO₄. Absorbance was measured at 490 nm with a plate reader and the mean absorbance plotted.

[0672] The results of the binding ELISA are presented in FIG. 66 and confirm that all the IGF1R-VEGF mAbdAb variants tested (BPC1603-1606) show binding to IGF-1R at levels comparable to the anti-IGF-1R antibody H0L0. EC50 values were calculated using Cambridgesoft Bioassay software and are as follows: H0L0 (0.1797 μg/ml)), BPC1603 (0.1602 μg/ml), BPC1604 (0.1160 μg/ml), BPC1605 (0.1975 μg/ml), BPC1606 (0.1403 μg/ml). The irrelevant control bispecific antibody BPC1601 showed now detectable binding to IGF-1R.

### Example 14.4

### VEGF Binding ELISA

[0673] A binding ELISA was carried out to test the binding of the purified anti IGF-1R/VEGF bispecific antibodies to VEGF. ELISA plates were coated with recombinant human VEGF (GSK) at 400 ng/ml in PBS and then blocked in blocking solution (4% BSA in TBS). Various concentrations of the purified mAbdAbs diluted in blocking solution were added and mAbdAb BPC1601 was included as a negative control. The plate was incubated for 1 hour at room temperature before washing in TBST. Binding was detected by the addition of a peroxidase labelled anti human kappa light chain antibody (Sigma A7164) at a dilution of 1/1000 in blocking solution. The plate was incubated for 40 minutes at room temp before washing in TBST. The plate was developed by addition of OPD substrate (Sigma P9187) and colour development stopped by addition of 3M H₂SO₄. Absorbance was measured at 490 nm with a plate reader and the mean absorbance plotted.

[0674] The results of the binding ELISA are presented in FIG. 67 and confirm that all four anti-IGF-1R/VEGF mAbdAbs (BPC1603-1606) can bind to immobilised VEGF. The apparent lower binding activity of BPC1605 and BPC1606 may be attributable to interference between the domain antibody (located at the C-terminus of the light chain) and the detection antibody. EC50 values were calculated using Cambridgesoft Bioassay software and are as follows: BPC1603 (0.044 μg/ml), BPC1604 (0.059 μg/ml), BPC1605 (0.571 μg/ml). It was not possible to calculate an accurate EC50 value for BPC1606 due to the lower response values. The anti-IGF-1R antibody H0L0 and the irrelevant control mAbdAb BPC1601 showed now detectable binding to VEGF.

### Example 14.5

### Kinetics of Binding to VEGF

[0675] A mouse monoclonal against human IgG (Biacore BR-1008-39) was immobilised by primary amine coupling to a CM5 biosensor chip. The antibody constructs were captured using this surface. After capture VEGF was passed over the surface which was then regenerated using 3M MgCl₂. The concentrations of VEGF used to generate kinetics were 256, 64, 16, 4, 1 and 0.25 nM, with a buffer only injection over the captured surface used for double referencing. The experiments were carried out on the Biacore T100 machine, using 1×HBS-EP buffer (BR-1006-69) at 25° C. The data were fitted to the 1:1 model inherent to the machine in its analysis software. The data shown in Table 19 is from two independent experiments.

TABLE 19
Kinetics of binding to human VEGF

| | Experiment 1 | | | Experiment 2 | | |
|---|---|---|---|---|---|---|
| | | | KD | | | KD |
| Construct | ka | kd | (nM) | ka | kd | (nM) |
| BPC1603 | 2.398E+6 | 2.762E−4 | 0.115 | 1.334E+6 | 3.497E−4 | 0.262 |
| BPC1604 | 9.933E+5 | 3.092E−4 | 0.311 | 5.806E+5 | 3.266E−4 | 0.563 |
| BPC1605 | 1.599E+6 | 2.161E−4 | 0.135 | 1.089E+6 | 2.727E−4 | 0.251 |
| BPC1606 | 4.343E+5 | 1.573E−4 | 0.362 | 2.717E+5 | 1.607E−4 | 0.591 |

### Example 14.6

### Inhibition of VEGF Binding to Receptor

[0676] The activity of the mAbdAbs was measured using a VEGF receptor binding assay as described in Method 12. The IC50s obtained in this assay for inhibition of the binding of VEGF to VEGFR2 are:

### BPC1603 (0.037 nM)

### BPC1604 (0.010 nM)

### BPC1605 (0.167 nM)

### BPC1606 (0.431 nM)

[0677] These results confirm that all four antigen binding constructs inhibit ligand binding to receptor.

### Example 14.7

### Inhibition of IGF-1R Receptor Phosphorylation

[0678] 3T3/LISN c4 cells were plated at a density of 10 000 cells/well into 96 well plates and incubated overnight in complete DMEM (DMEM-Hepes modification +10% FCS). Purified mAbdAbs were added to the cells and incubated for 1 hour. rhIGF-1 was added to the treated cells to achieve a final concentration of 50 ng/ml and incubated for a further 30 mins to stimulate receptor phosphorylation. The media was aspirated and then the cells lysed by the addition of RIPA lysis buffer (150 mM NaCl, 50 mM TrisHCl, 6 mM Na Deoxycholate, 1% Tween 20) plus protease inhibitor cocktail (Roche 11 697 498 001). The plate was frozen overnight. After thawing, lysate from each well was transferred to a 96 well ELISA plate pre-coated with an anti IGF-1R capture antibody 2B9 (GSK) at 2 μg/ml and blocked with 4% BSA/TBS. The plate was washed with TBST (TBS+0.1% Tween 20) and a Europium labelled anti Phosphotyrosine antibody (PerkinElmer DELFIA Eu-N1 PT66) diluted 1/2500 in 4% BSA/TBS was added to each well. After 1 hour incubation the plate was washed and DELFIA Enhancement (PerkinElmer 1244-105) solution added. After 10 min incubation the level of receptor phosphorylation was determined using a plate reader set up to measure Europium time resolved fluorescence (TRF).

[0679] The results of the experiment are presented in FIGS. 68 and 69. The results confirm that the mAbdAbs BPC1603-1606 can inhibit IGF-I mediated receptor phosphorylation at levels comparable to the anti-IGF-1R monoclonal antibody H0L0. an irrelevant antibody (labelled as IgG1, Sigma I5154) showed no activity in this assay.

### Example 15

### Anti-CD20/IL-13 Antigen Binding Protein

### Example 15.1

### Molecular Biology

[0680] The mammalian expression vectors encoding the heavy and light chain sequences of an anti-CD20 mAb set out in SEQ ID NO: 117 and 120 were constructed de novo using a PCR based approach and standard molecular biology techniques. Bispecific anti-CD20 mAb-anti-IL13dAb heavy and light chains were constructed by cloning the sequences encoding anti-CD20 mAb heavy and light variable regions into mammalian expression vectors containing human antibody constant regions fused to an anti-human IL-13 domain antibody (DOM10-53-474).

[0681] The mAbdAb expression constructs were transfected into CHOE1a cells. The supernatant was harvested and then the antibody purified using immobilised Protein A and quantified by reading absorbance at 280 nm. The mAbdAbs (and the anti-CD20 control mAb) constructed and tested are listed in Table 20.

TABLE 20

| | | | | | Seq ID: | Seq ID: | |
|---|---|---|---|---|---|---|---|
| | Alternative | Antibody | Domain | | for heavy | for light | Site of |
| Identifier | names | Target | antibody | Linker | chain | chain | fusion |
| BPC1401 | RituxanH- | CD20 | DOM10- | TVAAPSGS | 116 | 117 | Heavy chain |
| | TVAAPSGS- | | 53-474 | | | | C-term |
| | DOM474 | | | | | | |
| BPC1402 | RituxanH- | CD20 | DOM10- | GS | 118 | 117 | Heavy chain |
| | GS-DOM474 | | 53-474 | | | | C-term |
| BPC1403 | RituxanL- | CD20 | DOM10- | TVAAPSGS | 120 | 119 | Light chain |
| | TVAAPSGS- | | 53-474 | | | | C-term |
| | DOM474 | | | | | | |
| BPC1404 | RituxanL- | CD20 | DOM10- | GS | 120 | 121 | Light chain |
| | GS-DOM474 | | 53-474 | | | | C-term |
| anti-CD20 | Rituxan | CD20 | — | — | 120 | 117 | — |
| mAb | | | | | | | |

### Example 15.2

### Kinetics of Binding to Human IL-13

[0682] The binding affinity of mAbdAb constructs for human IL-13 were assessed by BIAcore™ analysis. Analyses were carried out anti-human IgG capture. Briefly, Anti-human IgG (Biacore BR-1008-39) was coupled onto a CM5 chip by primary amine coupling. MAbdAb constructs were then captured onto this surface and human IL-13 (made and purified at GSK) passed over at defined concentrations. The surface was regenerated back to the Anti-human IgG surface using 3M MgCl₂. This treatment did not significantly affect the ability to capture antibody for a subsequent IL-13 binding event. The runs were carried out at 25° C. using HBS-EP buffer, on the BIAcore™ T100 machine. Data were analysed using the evaluation software in the machine and fitted to the 1:1 binding model. The results of the analysis are presented in Table 48, confirming that for all mAbdAb constructs, the kinetics of binding to IL-13 are comparable.

TABLE 48
Surface plasmon resonance (BIAcore ™) data

| Antibody name | Ka (M⁻¹ · s⁻¹) | Kd (s⁻¹) | KD (nM) |
|---|---|---|---|
| BPC1401 | 5.81E+5 | 1.82E−4 | 0.313 |
| BPC1402 | 8.52E+5 | 3.05E−4 | 0.358 |
| BPC1403 | 1.07E+6 | 2.95E−4 | 0.277 |
| BPC1404 | 4.99E+5 | 5.08E−4 | 1.02 |
| PascoH-474 GS | 6.29E+5 | 2.66E−4 | 0.423 |
| removed | | | |

| | |
|---|---|
| anti-CD20 mAb | No binding detected |

[0683] Binding of the mAb-dAbs to CD20 was assessed by flow cytometry using a CD20 positive cell line (Wein133). All mAb-dAbs (BPC1401-BPC1404) and the anti-CD20 control antibody showed a dose dependent increase in mean fluorescence intensity (MFI) (data not shown).

### Example 15.3

### ADCC Assay with Anti-CD20/IL-13 Bispecific Antibody

[0684] The ADCC assay was based on the published method of Boyd et al. (1995) J. Imm. Meth. 184:29-38. Briefly, Raji cells (targets) were labelled with Europium as follows. Cells were harvested, counted and prepared to a final density of 1×10⁷ in a 15 ml falcon tube, wash once with Hepes buffer (50 mM HEPES, 83 mM NaCl, 5 mM KCl, 2 mM MgCl₂.H₂O, pH7.4). The cells were pelleted and 1 ml of ice cold Europium labelling buffer (HEPES buffer plus 600 μM EuCl₃, 3 mM DTPA and 25 mg/ml Dextran sulphate) was added to each tube. The cell suspension was flicked vigorously at the start of the labelling and then every 10 minutes during the 30 minute incubation period on ice. 10 ml ice cold repair buffer (Hepes buffer containing 294 mg/l CaCl₂.2H₂O, 1.8 g/l D-Glucose, pH7.4) was added and the cells incubated on ice for a further 10 minutes. The cells were then centrifuged, the supernatant decanted and washed twice with repair buffer and then once with complete medium. The labelled cells were then counted and resuspended in serum free medium at 2×10⁵ cells/ml and stored on ice.

[0685] Human purified blood mononuclear cells (PBMCs or effector cells) were prepared as follows. 150 mls of whole blood was centrifuged at 2000 rpm for 10 mins to remove the serum. The cells were the diluted to twice the original volume with PBS (Invitrogen/Gibco, #14190). Accuspin density gradient tubes (Sigma, #A2055-10EA) were prepared by adding 15 ml lymphoprep (Axis shield, #NYC1114547) and centrifuged for 1 min at 1500 rpm. 25 ml of blood suspension was added to the density gradient tubes and centrifuged for 20 min at 2500 rpm with the centrifuge brake off. The top 10 ml of supernatant was discarded. The remainder (including the “buffy” layer) was poured into a clean tube, topped up with PBS and centrifuged at 1500 rpm for 5 mins. The supernatant was discarded, the cell pellets pooled, wash once in RPMI medium, recentrifuged and counted. Effector cells at were prepared at 5×10⁶/ml in serum free RPMI medium.

[0686] The assay plates were set up in 96-well round bottom plates (Nunc 96 maxisorb plate, #735-0199) as follows. Antibody dilutions were made in serum free RPMI medium at a starting concentration of approximately 12 μg/ml and eleven further 3-fold dilutions. Using the plate layout below, 50 μl antibody sample was added to the appropriate wells (rows B-G only), allowing 6 replicates per dilution). 50 μl RPMI medium was added to all wells in rows A and H. 50 μl of RPMI medium was added to all wells in plates labelled medium. 50 μl recombinant human IL-13 diluted in RPMI medium to 4 μg/ml (1 μg/ml final concentration, GSK in-house material) was added to all wells in plates labelled +IL13. All plates were incubated at 4° C. for minimum 30 minutes. 50 μl of Europium labelled target cells were added to all plates. 20 μl of a 10× triton was added to all wells in row H on all plates. Plates were incubated 4° C. for a minimum of 30 minutes. 50 μl RPMI medium was added to all wells in columns labelled targets alone. 50 μl PBMCs was added to all wells in columns labelled effector:targets to give a 25:1 ratio. The plates were centrifuged at 1500 rpm for 3 mins and incubated at 37° C. for 3-4 hrs. 200 μl of enhancement solution (Wallac/Perkin Elmer, Catalogue#1244-105) was added to each well of a nunc immunosorbant ELISA plates (one ELISA plate for each assay plate). 20 μl of supernatant was transferred from assay plate to ELISA plate. The ELISA plates were incubated at room temperature on plate shaker for a minimum 30 minutes or stored over night at 4° C. Europium release is measured using time-delayed fluorimetry (Wallac Victor plate reader). Spontaneous lysis=measurement of Europium released from cells and medium alone. Maximum lysis=non-specific lysis of target cells by addition of Triton-X100 (non-ionic detergent).

| Effector:Targets | | | Targets | | | Effector:Targets | | | Targets | | |
|---|---|---|---|---|---|---|---|---|---|---|---|
| 1 | 2 | 3 | 4 | 5 | 6 | 7 | 8 | 9 | 10 | 11 | 12 |

| | | |
|---|---|---|
| A | Spontaneous release | Spontaneous release |

| | | | | |
|---|---|---|---|---|
| B | 3 | μg/ml | 0.003 | μg/ml |
| C | 1 | μg/ml | 0.001 | μg/ml |
| D | 0.3 | μg/ml | 0.0003 | μg/ml |
| E | 0.1 | μg/ml | 0.0001 | μg/ml |
| F | 0.03 | μg/ml | 0.00003 | μg/ml |
| G | 0.01 | μg/ml | 0.00001 | μg/ml |

| | | |
|---|---|---|
| H | Maximum release | Maximum release |

[0687] The ADCC assay was performed on two separate occasions using two different donor PBMCs. The results from one representative assay are presented in FIGS. 70 and 71. In addition, a similar ADCC assay using a shorter dose range was performed on a separate occasion using different donor PBMCs. The results from this assay are presented in FIGS. 72 and 73.

### Example 15.4

### CDC Assay with Anti-CD20/IL-13 Bispecific Antibody

[0688] WEIN cells (targets) were labelled with Europium as follows. Briefly, cells were harvested, counted and prepared to a final density of 1×10⁷ in a 15 ml falcon tube, wash once with Hepes buffer (50 mM HEPES, 83 mM NaCl, 5 mM KCl, 2 mM MgCl₂.H₂O, pH7.4). The cells were pelleted and 1 ml of ice cold Europium labelling buffer (HEPES buffer plus 600 μM EuCl₃, 3 mM DTPA and 25 mg/ml Dextran sulphate) was added to each tube. The cell suspension was flicked vigorously at the start of the labelling and then every 10 minutes during the 30 minute incubation period on ice. 10 ml ice cold repair buffer (Hepes buffer containing 294 mg/l CaCl₂.2H₂O, 1.8 g/l D-Glucose, pH7.4) was added and the cells incubated on ice for a further 10 minutes. The cells were then centrifuged, the supernatant decanted and washed twice with repair buffer and then once with complete medium. The labelled cells were then counted and resuspended in serum free medium at 2×10⁵ cells/ml and stored on ice.

[0689] Serum was removed from whole blood collected from in house donors by centrifugation. Half of the sample was inactivated by heat treatment at 56° C. for 30 mins. Antibodies samples were diluted in serum free RPMI medium, starting a 12 μg/ml with five further 3-fold dilutions. 50 μl antibody sample was added to appropriate wells in rows B-G only (as per the plate layout below). 50 μl RPMI medium was added to all wells in columns 1 to 6. Where indicated, 50 μl recombinant human IL-13 (at 4 μg/ml in RPMI medium) was added to all wells in columns 7 to 12. The plates were incubated at 4° C. for a minimum 30 minutes. 50 μl of Europium labelled target cells were added to all the plates and the plates incubated at 4° C. for minimum of 30 minutes. 50 μl of serum (active or heat-inactivated) was added to the appropriate wells (see plate layout below). The plates were incubated at 37° C. incubator for 2-3 hrs, after which time the plates were centrifuged at 1500 rpm for 3 mins. 200 μl of enhancement solution (Wallac/Perkin Elmer, Catalogue#1244-105) was added to each well of a Nunc immunosorbant ELISA plates (one ELISA plate for each assay plate). 20 μl of supernatant was transferred from assay plate to ELISA plate. The ELISA plates were incubated at room temperature on plate shaker for a minimum 30 minutes or stored over night at 4° C. Europium release is measured using time-delayed fluorimetry (Wallac Victor plate reader). Spontaneous lysis=measurement of Europium released from cells and medium alone. Maximum lysis=non-specific lysis of target cells by addition of Triton-X100 (non-ionic detergent).

| MEDIUM | | | | | | IL13 | | | | | |
|---|---|---|---|---|---|---|---|---|---|---|---|
| Active | | | Heat | | | Active | | | | | |
| complement | | | treated | | | complement | | | Heat treated | | |
| 1 | 2 | 3 | 4 | 5 | 6 | 7 | 8 | 9 | 10 | 11 | 12 |

| | |
|---|---|
| A | Spontaneous |
| | release |

| | | |
|---|---|---|
| B | 3 | μg/ml |
| C | 1 | μg/ml |
| D | 0.3 | μg/ml |
| E | 0.1 | μg/ml |
| F | 0.03 | μg/ml |
| G | 0.01 | μg/ml |

| | |
|---|---|
| H | Maximum |
| | release |

[0690] The CDC assay was performed on three separate occasions using three different donor sera. The results from one representative assay are presented in FIGS. 74 and 75 and show that the CDC activity of the antibody samples is comparable in the absence of IL-13. In the presence of excess IL-13, the CDC activity of antibody samples BPC1401 and BPC1402 (domain antibody fused to the heavy chain) is reduced whilst the CDC activity of BPC1403 and BPC1404 (domain antibody fused to the light chain) is largely unaffected by the presence of IL-13.

### Example 16

### 16.1 Design and Construction of Antigen Binding Proteins Comprising Epitope Binding Domains Composed of Alternative Scaffolds

[0691] Five alternative scaffolds, listed below, were combined with monoclonal antibodies to provide mAb-alternative scaffold bispecific molecules:
[0692] anti VEGF tear lipocalin (TLPC)
[0693] anti HER2 Affibody (AFFI)
[0694] anti HER2 DARPin (DRPN)
[0695] anti hen egg white lysozyme (NARV)
[0696] anti-RNaseA Camelid VHH

[0697] The protein sequences of TLPC (for further information see US2007/0224633), AFFI (for further information see WO2005003156A1), DRPN (for further information see Zahnd, C. et al. (2007), J. Mol. Biol., 369, 1015-1028) and NARV (for further information see US20050043519A) were reverse-translated to DNA and codon optimised. A BamHI site at the N-terminus and EcoR1 site at the C-terminus were included on each of these four alternative scaffolds to facilitate cloning.

[0698] DNA fragments encoding the four final alternative scaffold DNA sequences were constructed de novo using a PCR-based strategy and overlapping oligonucleotides. The TLPC, AFFI and DRPN PCR products were cloned into mammalian expression vectors containing the heavy chain of H0L0, an anti-hIGF-1R antibody. The resulting DNA sequences encode the alternative scaffolds fused onto the C-terminus of the heavy chain via a TVAAPSGS linker or GS linker. The NAR V PCR product was cloned into mammalian expression vectors containing DNA encoding the heavy chain of Pascolizumab (an anti-IL-4 antibody). The resulting DNA sequence encodes the NAR V fused onto the C-terminus of the heavy chain via a GS linker.

[0699] An anti-RNAse A camelid VHH DNA sequence was modified by PCR to include a BamHI site at the 5′ end and an EcoR1 site at the 3′ end in order to facilitate cloning. The PCR product was cloned into mammalian expression vectors containing the heavy chain of Pascolizumab, an anti-IL4 antibody. The resulting DNA sequence encodes a camelid VHH fused onto the C-terminus of the heavy chain via a GS linker.

[0700] Table 21 below is a summary of the antigen binding proteins that have been constructed.

TABLE 21

| | | SEQ ID |
|---|---|---|
| Antibody | | NO: amino |
| ID | Description | acid sequence |
| BPC1803 | antiIGF1R Heavy Chain-GS-TLPC | 123 |
| | antiIGF1R Light Chain | 113 |
| BPC1804 | antiIGF1R Heavy Chain-TVAAPSGS-TLPC | 125 |
| | antiIGF1R Light Chain | 113 |
| BPC1805 | antiIGF1R Heavy Chain-GS-AFFI | 126 |
| | antiIGF1R Light Chain | 113 |
| BPC1806 | antiIGF1R Heavy Chain-TVAAPSGS-AFFI | 127 |
| | antiIGF1R Light Chain | 113 |
| BPC1807 | antiIGF1R Heavy Chain-GS-DRPN | 128 |
| | antiIGF1R Light Chain | 113 |
| BPC1808 | antiIGF1R Heavy Chain-TVAAPSGS-DRPN | 129 |
| | antiIGF1R Light Chain | 113 |
| BPC1809 | Anti IL-4 heavy Chain-GS-anti RNAse A | 130 |
| | camelidVHH | |
| | Anti IL-4 Light Chain | 15 |
| BPC1816 | Anti IL-4 heavy Chain-GS-NARV | 131 |
| | Anti IL-4 Light Chain | 15 |

[0701] Expression plasmids encoding the heavy and light chains of the antigen binding proteins set out in Table 21 were transiently co-transfected into HEK 293-6E cells using 293fectin (Invitrogen, 12347019). A tryptone feed was added to each of the cell cultures the same day or the following day and the supernatant material was harvested after about 2 to 6 days from initial transfection. The antigen binding protein was purified from the supernatant using a Protein A column before being tested in binding assays.

### 16.2: rhIGF-1R Binding ELISA

[0702] 96-well high binding plates were coated with 1 μg/ml of anti-his-tag antibody (Abcam, ab9108) in PBS and stored overnight at 4° C. The plates were washed twice with Tris-Buffered Saline with 0.05% of Tween-20. 200 μL of blocking solution (5% BSA in DPBS buffer) was added in each well and the plates were incubated for at least 1 hour at room temperature. Another wash step was then performed. 0.4 μg/mL of rhIGF-1R (R&D systems) was added to each well at 50 μL per well. The plates were incubated for an hour at room temperature and then washed. The purified antigen binding proteins/antibodies were successively diluted across the plates in blocking solution. After 1 hour incubation, the plates were washed. Goat anti-human kappa light chain specific peroxidase conjugated antibody was diluted in blocking solution to 1 μg/mL and 50 μL was added to each well. The plates were incubated for one hour. After another wash step, 50 μl of OPD (o-phenylenediamine dihydrochloride) SigmaFast substrate solution was added to each well and the reaction was stopped 15 minutes later by addition of 25 μL of 3M sulphuric acid. Absorbance was read at 490 nm using the VersaMax Tunable Microplate Reader (Molecular Devices) using a basic endpoint protocol.

[0703] FIGS. 76, 78 and 80 show the ELISA results and confirm that antigen binding proteins BPC1803-BPC1808 bind to recombinant human IGF-1R. The anti-IGF-1R monoclonal antibody H0L0 also showed binding to recombinant human IGF-1R whereas the negative control antibody (sigma I5154) showed no binding to IGF-1R.

### 16.3: VEGF Binding ELISA

[0704] 96-well high binding plates were coated with 0.4 μg/mL of hVEGF165 (R&D Systems) and incubated at +4° C. overnight. The plates were washed twice with Tris-Buffered Saline with 0.05% of Tween-20. 200 μL of blocking solution (5% BSA in DPBS buffer) was added to each well and the plates were incubated for at least 1 hour at room temperature. Another wash step was then performed. The purified antigen binding proteins/antibodies were successively diluted across the plates in blocking solution. After 1 hour incubation, the plates were washed. Goat anti-human kappa light chain specific peroxidase conjugated antibody was diluted in blocking solution to 1 μg/mL and 50 μL was added to each well. The plates were incubated for one hour. After another wash step, 50 μl of OPD (o-phenylenediamine dihydrochloride) SigmaFast substrate solution was added to each well and the reaction was stopped 15 minutes later by addition of 25 μL of 3M sulphuric acid. Absorbance was read at 490 nm using the VersaMax Tunable Microplate Reader (Molecular Devices) using a basic endpoint protocol.

[0705] FIG. 77 shows the results of the VEGF binding ELISA and confirms that bispecific antibodies BPC1803 and BPC1804 bind to human VEGF. An anti VEGF bispecific antibody (BPC1603) was used as a positive control in this assay and showed binding to VEGF. In contrast the anti-IGF-1R monoclonal antibody H0L0 showed no binding to human VEGF.

### 16.4: HER2 Binding ELISA

[0706] 96-well high binding plates were coated with 1 μg/mL of HER2 (R&D Systems) and incubated at +4° C. overnight. The plates were washed twice with Tris-Buffered Saline with 0.05% of Tween-20. 200 μL of blocking solution (5% BSA in DPBS buffer) was added to each well and the plates were incubated for at least 1 hour at room temperature. Another wash step was then performed. The purified antigen binding proteins/antibodies were successively diluted across the plates in blocking solution. After 1 hour incubation, the plates were washed. Goat anti-human kappa light chain specific peroxidase conjugated antibody was diluted in blocking solution to 1 μg/mL and 50 μL was added to each well. The plates were incubated for one hour. After another wash step, 50 μl of OPD (o-phenylenediamine dihydrochloride) SigmaFast substrate solution was added to each well and the reaction was stopped 15 minutes later by addition of 25 μL of 3M sulphuric acid. Absorbance was read at 490 nm using the VersaMax Tunable Microplate Reader (Molecular Devices) using a basic endpoint protocol.

[0707] FIGS. 79 and 81 show the results of the HER2 binding ELISA and confirms that the antigen binding proteins BPC1805, BPC1806, BPC1807 and BPC1808 bind to recombinant human HER2. Herceptin was used as a positive control in this assay and showed binding to HER2. In contrast the anti-IGF-1R monoclonal antibody H0L0 showed no binding to human HER2.

### 16.5: IL-4 Binding ELISA

[0708] 96-well high binding plates were coated with 5 μg/ml of human IL-4 in PBS and stored overnight at 4° C. The plates were washed twice with Tris-Buffered Saline with 0.05% of Tween-20. 200 μL of blocking solution (5% BSA in DPBS buffer) was added in each well and the plates were incubated for at least 1 hour at room temperature. Another wash step was then performed. The purified antigen binding proteins/antibodies were successively diluted across the plates in blocking solution. After 1 hour incubation, the plates were washed. Goat anti-human kappa light chain specific peroxidase conjugated antibody (Sigma, A7164) was diluted in blocking solution to 1 μg/mL and 50 μL was added to each well. The plates were incubated for one hour. After another wash step, 50 μl of OPD (o-phenylenediamine dihydrochloride) SigmaFast substrate solution was added to each well and the reaction was stopped 15 minutes later by addition of 25 μL of 3M sulphuric acid. Absorbance was read at 490 nm using the VersaMax Tunable Microplate Reader (Molecular Devices) using a basic endpoint protocol.

[0709] FIG. 82 shows the results of the ELISA and confirms that antigen binding protein BPC1809 binds to human IL-4 at levels comparable to the anti IL-4 monoclonal antibody, Pascolizumab. The negative control antibody (Sigma I5154) showed no binding to IL-4.

[0710] FIG. 84 shows the results of the ELISA and confirms that antigen binding protein BPC1816 binds to human IL-4 at levels comparable to the anti IL-4 monoclonal antibody, Pascolizumab. The negative control antibody (Sigma I5154) showed no binding to IL-4.

### 16.6: RNAse A Binding ELISA

[0711] 50 uL of 1 ug/mL RNAse A (Qiagen, 19101) that had been diluted in PBS was added to each well of a 96 well Costar plate. The plate was incubated for 2 hours at room temperature then washed with PBST before addition of 200 uL of 4% BSA/PBS block to each well. The plate was incubated for an hour and washed before addition of the samples. Purified antibodies and antigen binding protein BPC1809 were added at a concentration of 2 ug/mL in wells of column 1 then serially diluted 1 in 2 across the plate in block. The plate was incubated for an hour then washed. 50 ul/well of Goat anti-human kappa light chain specific peroxidase conjugated antibody (Sigma, A7164) was added at a 1 in 1000 dilution. The plate was incubated for an hour then washed. 50 uL of OPD was added to each well and the reaction was stopped with 3M sulphuric acid after 15-30 minutes. Absorbance was read at 490 nm using the VersaMax Tunable Microplate Reader (Molecular Devices) using a basic endpoint protocol.

[0712] FIG. 83 shows the results of the RNAse A binding ELISA and confirms that purified human monoclonal antibody-camelid VHH bispecific antibody BPC1809 shows binding to RNAse A. In contrast both the IL-4 monoclonal antibody Pascolizumab and the negative control (sigma I5154) showed no binding to RNAse A.

### 16.7: HEL Binding ELISA

[0713] A 96-well high binding plate was coated with 5 μg/ml of HEL (Hen Egg Lysozyme, Sigma L6876) in PBS and stored overnight at 4° C. The plate was washed twice with Tris-Buffered Saline with 0.05% of Tween-20. 200 μL of blocking solution (5% BSA in DPBS buffer) was added in each well and the plate was incubated for at least 1 hour at room temperature. Another wash step was then performed. The purified antibodies were successively diluted across the plate in blocking solution. After 1 hour incubation, the plate was washed. Goat anti-human kappa light chain specific peroxidase conjugated antibody (Sigma, A7164) was diluted in blocking solution to 1 μg/mL and 50 μL was added to each well. The plate was incubated for one hour. After another wash step, 50 μl of OPD (o-phenylenediamine dihydrochloride) SigmaFast substrate solution was added to each well and the reaction was stopped 15 minutes later by addition of 25 μL of 3M sulphuric acid. Absorbance was read at 490 nm using the VersaMax Tunable Microplate Reader (Molecular Devices) using a basic endpoint protocol.

[0714] FIG. 85 shows the results of the HEL binding ELISA and confirms that purified human monoclonal antibody—NAR V bispecific antibody BPC1816 binds to HEL. In contrast the IL-4 monoclonal antibody Pascolizumab showed no binding to HEL.

### Example 17

### 17.1 Design and Construction of Antigen-Binding Proteins Comprising Epitope Binding Domains Composed of Adnectin

[0715] CT01 adnectin is specific for VEGFR2 (for further information see WO2005/056764). The CT01 adnectin protein sequence was reverse-translated to DNA and codon optimised. A BamHI site at the N-terminus and EcoR1 site at the C-terminus were included to facilitate cloning.

[0716] DNA fragments encoding the final CT01 DNA sequence were constructed de novo using a PCR-based strategy and overlapping oligonucleotides. The PCR product was cloned into mammalian expression vectors containing the heavy chain of H0L0 (an anti-hIGF-1R antibody) allowing the adnectin to be fused onto the C-terminus of the heavy chain via either a GS linker or a TVAAPSGS linker. Protein sequences of the heavy and light chains of the IGF-1R-VEGFR2 bispecific are given in SEQ ID numbers 124, 113 and 133.

[0717] Another adnectin protein sequence coding for an anti-TNF-α adnectin (for further information see US20080139791) was reverse translated to DNA, codon optimised and modified to include terminal BamHI and EcoR1 sites before being constructed using the overlapping oligonucleotide PCR method described previously. The PCR product was cloned into mammalian expression vectors containing DNA encoding the heavy chain of Pascolizumab (an anti-IL-4 antibody) allowing DNA encoding the anti-TNF-α adnectin to be fused onto the C-terminus of the heavy chain via either a GS linker or a TVAAPSGS linker. Protein sequences of the heavy and light chains of the IL-4-TNF-α bispecific are given in SEQ ID NO: 146, 147 and 15.

[0718] Antigen binding proteins using the TNF-α specific adnectin fused at the C-terminus of the heavy chain of an IL-13 monoclonal antibody have also been designed. Example protein sequences are given in SEQ ID's 134, 13 and 135. In addition, bispecific molecules based on the fusion of CT01 at either the C-terminus or the N-terminus of the heavy or light chain of anti-EGFR antibodies Erbitux and IMC-11F8 have been designed. Examples of protein sequences which have been designed are given in SEQ ID NO: 136-145.

[0719] Of these example sequences, a number were constructed. DNA sequences encoding SEQ ID NO 136 (CT01 fused onto the C-terminus of the Erbitux heavy chain), SEQ ID NO 144 (CT01 fused onto the N-terminus of Erbitux heavy chain) and SEQ ID NO 138 (CT01 fused onto the C-terminus of the Erbitux light chain) were constructed. All three sequences were constructed using PCR-based cloning methods and cloned into mammalian expression vectors. Table 22 below is a summary of the antigen binding proteins that have been designed and/or constructed.

TABLE 22

| | | SEQ ID NO: |
|---|---|---|
| | | amino acid |
| Antibody ID | Description | sequence |
| BPC1801 | antiIGF1R Heavy Chain-GS-CT01 adnectin | 124 |
| (constructed) | antiIGF1R Light Chain | 113 |
| BPC1802 | antiIGF1R Heavy Chain-TVAAPSGS-CT01 | 133 |
| (constructed) | adnectin | |
| | antiIGF1R Light Chain | 113 |
| BPC1810 | antiIL13-Heavy Chain-GS-antiTNFα | 134 |
| (designed) | adnectin | |
| | antiIL13-Light Chain | 13 |
| BPC1811 | antiIL13-Heavy Chain-TVAAPSGS- | 135 |
| (designed) | antiTNFα adnectin | |
| | antiIL13-Light Chain | 13 |
| BPC1812 | Erbitux Heavy chain-RS-CT01 adnectin | 136 |
| (constructed) | Erbitux Light Chain | 137 |
| BPC1813 | Erbitux Light chain-RS-CT01 adnectin | 138 |
| (constructed) | Erbitux Heavy Chain | 139 |
| BPC1814 | 11F8 Heavy Chain-GS-CT01 adnectin | 140 |
| (designed) | 11F8 Light Chain | 141 |
| BPC1815 | 11F8 Light Chain-GS-CT01 adnectin | 142 |
| (designed) | 11F8 Heavy Chain | 143 |
| BPC1818 | GS-CT01 adnectin-GSTG-Erbitux Heavy | 144 |
| (constructed) | Chain | |
| | Erbitux Light Chain | 137 |
| BPC1819 | CT01 adnectin-STG-Erbitux Light Chain | 145 |
| (designed) | Erbitux Heavy Chain | 139 |
| BPC1823 | Anti IL-4 Heavy Chain-GS-anti TNF-α | 146 |
| (constructed) | adnectin | |
| | Anti IL-4 Light Chain | 15 |
| BPC1822 | Anti IL-4 Heavy Chain-TVAAPSGS-anti | 147 |
| (constructed) | TNF-α adnectin | |
| | Anti IL-4 Light Chain | 15 |

[0720] Expression plasmids encoding the heavy and light chains of BPC1801, BPC1802, BPC1822, BPC1823, BPC1812, BPC1813 and BPC1818 were transiently co-transfected into HEK 293-6E cells using 293fectin (Invitrogen, 12347019). A tryptone feed was added to the cell culture the same day or the following day and the supernatant material was harvested after about 2 to 6 days from initial transfection. In some instances the supernatant material was used as the test article in binding assays. In other instances, the antigen binding protein was purified using a Protein A column before being tested in binding assays.

### 17.2: rhIGF-1R Binding ELISA

[0721] 96-well high binding plates were coated with 1 μg/ml of anti-his-tag antibody (Abcam, ab9108) in PBS and stored overnight at 4° C. The plates were washed twice with Tris-Buffered Saline with 0.05% of Tween-20. 200 μL of blocking solution (5% BSA in DPBS buffer) was added in each well and the plates were incubated for at least 1 hour at room temperature. Another wash step was then performed. 0.4 μg/mL of rhIGF-1R (R&D systems) was added to each well at 50 μL per well. The plates were incubated for an hour at room temperature and then washed. The purified antigen binding proteins/antibodies were successively diluted across the plates in blocking solution. After 1 hour incubation, the plates were washed. Goat anti-human kappa light chain specific peroxidase conjugated antibody was diluted in blocking solution to 1 μg/mL and 50 μL was added to each well. The plates were incubated for one hour. After another wash step, 50 μl of OPD (o-phenylenediamine dihydrochloride) SigmaFast substrate solution was added to each well and the reaction was stopped 15 minutes later by addition of 25 μL of 3M sulphuric acid. Absorbance was read at 490 nm using the VersaMax Tunable Microplate Reader (Molecular Devices) using a basic endpoint protocol.

[0722] FIG. 86 shows the results of the IGF-1R binding ELISA and confirms that purified human monoclonal antibody-adnectin bispecific antibodies (BPC1801 and BPC 1802) bind to recombinant human IGF-1R at levels comparable to the anti-IGF-1R monoclonal antibody H0L0. The negative control antibody (Sigma I5154) showed no binding to IGF-1R.

### 17.3: VEGFR2 Binding ELISA

[0723] 96-well high binding plates were coated with 0.4 μg/mL of VEGFR2 (R&D Systems) and incubated at +4° C. overnight. The plates were washed twice with Tris-Buffered Saline with 0.05% of Tween-20. 200 μL of blocking solution (5% BSA in DPBS buffer) was added to each well and the plates were incubated for at least 1 hour at room temperature. Another wash step was then performed. The supernatants or purified antibodies were successively diluted across the plates in blocking solution. After 1 hour incubation, the plate was washed. Goat anti-human kappa light chain specific peroxidase conjugated antibody was diluted in blocking solution to 1 μg/mL and 50 μL was added to each well. The plates were incubated for one hour. After another wash step, 50 μl of OPD (o-phenylenediamine dihydrochloride) SigmaFast substrate solution was added to each well and the reaction was stopped 15 minutes later by addition of 25 μL of 3M sulphuric acid. Absorbance was read at 490 nm using the VersaMax Tunable Microplate Reader (Molecular Devices) using a basic endpoint protocol.

[0724] FIG. 87 shows the results of the VEGFR2 binding ELISA and confirms that purified human monoclonal antibody-adnectin bispecific antibodies (BPC1801 and BPC1802) bind to recombinant human VEGFR2. In contrast the anti-IGF-1R monoclonal antibody H0L0showed no binding to human VEGFR2.

[0725] FIG. 172 shows the results of the VEGFR2 binding ELISA and confirms that antigen binding proteins BPC1818 and BPC1813 bind to recombinant human VEGFR2. In contrast Erbitux showed no binding to human VEGFR2. For the antigen binding proteins BPC1813 and BPC1818, the amount of antibody in the supernatant was not quantified thus the data presented in FIG. 172 is represented as a dilution factor of the neat supernatant material. For Erbitux, purified material was used in the assay aT the starting concentration of 2 μg/ml, which is equivalent to dilution factor of 1 in FIG. 172.

[0726] FIG. 175 shows the results of the VEGFR2 binding ELISA and confirms that antigen binding protein BPC1812 binds to recombinant human VEGFR2. In contrast Erbitux and the negative control Sigma IgG I5154 antibody showed no binding to human VEGFR2. For the antigen binding protein BPC1812, the amount of antibody in the supernatant was not quantified thus the data presented in FIG. 175 is represented as a dilution factor of the neat supernatant material. For Erbitux and Sigma IgG I5154 purified material was used in the assay at the starting concentration of 2 μg/ml, which is equivalent to dilution factor of 1 in FIG. 175.

### 17.4: IL-4 Binding ELISA

[0727] 96-well high binding plates were coated with 5 μg/ml of human IL-4 in PBS and stored overnight at 4° C. The plates were washed twice with Tris-Buffered Saline with 0.05% of Tween-20. 200 μL of blocking solution (5% BSA in DPBS buffer) was added in each well and the plates were incubated for at least 1 hour at room temperature. Another wash step was then performed. The supernatant or purified antibodies/antigen binding proteins were successively diluted across the plate in blocking solution. After 1 hour incubation, the plates were washed. Goat anti-human kappa light chain specific peroxidase conjugated antibody (Sigma, A7164) was diluted in blocking solution to 1 μg/mL and 50 μL was added to each well. The plates were incubated for one hour. After another wash step, 50 μl of OPD (o-phenylenediamine dihydrochloride) SigmaFast substrate solution was added to each well and the reaction was stopped 15 minutes later by addition of 25 μL of 3M sulphuric acid. Absorbance was read at 490 nm using the VersaMax Tunable Microplate Reader (Molecular Devices) using a basic endpoint protocol.

[0728] FIG. 88 shows the results of the IL-4 binding ELISA and confirms that human monoclonal antibody-adnectin bispecific antibodies (BPC1823 and BPC 1822) bind to recombinant human IL-4. The positive control anti-IL-4 monoclonal antibody Pascolizumab showed binding to IL-4 and the negative control antibody (Sigma I5154) showed no binding to IL-4.

[0729] The HEK transfection for this experiment was repeated to obtain supernatant material with a higher antibody concentration. FIG. 88b shows binding of this higher concentration supernatant human monoclonal antibody-adnectin bispecific antibody (BPC1823) to human IL-4 as determined by ELISA

[0730] For the antigen binding proteins BPC1823 and BPC1822, the amount of antibody in the supernatant was not quantified thus the data presented in FIGS. 88 and 88b is represented as a dilution factor of the neat supernatant material. For Pascolizumab and the negative control antibody (Sigma I5154), purified material was used in the assay and the starting concentration of 1 μg/ml, which is equivalent to dilution factor of 1 in FIGS. 88 and 88b.

### 17.5: TNF-α Binding ELISA

[0731] A 96-well high binding plate was coated with 0.4 μg/ml of recombinant human TNFα (RnD Systems 210-TA-050/CF) in PBS and stored overnight at 4° C. The plate was washed twice with Tris-Buffered Saline with 0.05% of Tween-20. 200 μL of blocking solution (5% BSA in DPBS buffer) was added in each well and the plate was incubated for at least 1 hour at room temperature. Another wash step was then performed. The supernatant or purified antibodies were successively diluted across the plate in blocking solution. After 1 hour incubation, the plate was washed. Goat anti-human kappa light chain specific peroxidase conjugated antibody (Sigma, A7164) was diluted in blocking solution to 1 μg/mL and 50 μL was added to each well. The plate was incubated for one hour. After another wash step, 50 μl of OPD (o-phenylenediamine dihydrochloride) Sigma Fast substrate solution was added to each well and the reaction was stopped 15 minutes later by addition of 25 μL of 3M sulphuric acid. Absorbance was read at 490 nm using the VersaMax Tunable Microplate Reader (Molecular Devices) using a basic endpoint protocol.

[0732] FIG. 89 shows the results of the TNF-α binding ELISA and confirms that human monoclonal antibody-adnectin bispecific antibodies (BPC1823 and BPC1822) bind to recombinant human TNF-α. In contrast the anti-IL-4 monoclonal antibody Pascolizumab showed no binding to recombinant human TNF-α.

[0733] The HEK transfection for this experiment was repeated to obtain supernatant material with a higher antibody concentration. FIG. 89b shows binding of this higher concentration supernatant human monoclonal antibody-adnectin bispecific antibody (BPC1823) to recombinant human TNF-α as determined by ELISA. The IgG control showed no binding to recombinant human TNF-α.

[0734] For the antigen binding proteins BPC1822 and BPC1823, the amount of antibody in the supernatant was not quantified thus the data presented in FIGS. 89 and 89b is represented as a dilution factor of the neat supernatant material. For Pascolizumab, purified material was used in the assay at the starting concentration of 1 μg/ml, which is equivalent to dilution factor of 1 in FIGS. 89 and 89b.

### 17.6: EGFR Binding ELISA

[0735] A 96-well high binding plate was coated with 0.67 μg/ml of recombinant human EGFR protein in PBS and stored overnight at 4° C. The plate was washed twice with Tris-Buffered Saline with 0.05% of Tween-20. 200 μL of blocking solution (5% BSA in DPBS buffer) was added in each well and the plate was incubated for at least 1 hour at room temperature. Another wash step was then performed. The antigen binding proteins/antibodies were successively diluted across the plate in blocking solution. After 1 hour incubation, the plate was washed. Goat anti-human kappa light chain specific peroxidase conjugated antibody (Sigma, A7164) was diluted in blocking solution to 1 μg/mL and 50 μL was added to each well. The plate was incubated for one hour. After another wash step, 50 μl of OPD (o-phenylenediamine dihydrochloride) Sigma Fast substrate solution was added to each well and the reaction was stopped 25 minutes later by addition of 25 μL of 3M sulphuric acid. Absorbance was read at 490 nm using the VersaMax Tunable Microplate Reader (Molecular Devices) using a basic endpoint protocol.

[0736] FIG. 171 shows the results of the EGFR binding ELISA and confirms that bispecific antibodies BPC1818 and BPC1813 bind to recombinant human EGFR. The positive control antibody, Erbitux, also showed binding to recombinant human EGFR. In contrast the Sigma IgG I5154 showed no binding to recombinant human EGFR. For the bispecific antibodies BPC1813 and BPC1818, the amount of antibody in the supernatant was not quantified thus the data presented in FIG. 171 is represented as a dilution factor of the neat supernatant material. For Erbitux and the negative control antibody (Sigma I5154), purified material was used in the assay and the starting concentration of 2 μg/ml and 1 μg/ml respectively, which is equivalent to dilution factor of 1 in FIG. 171.

[0737] FIG. 176 shows the results of the EGFR binding ELISA and confirms that bispecific antibodies BPC1812 binds to recombinant human EGFR. The positive control antibody, Erbitux, also showed binding to recombinant human EGFR. In contrast the Sigma IgG i5154 showed no binding to recombinant human EGFR. For the bispecific antibodies BPC1812, the amount of antibody in the supernatant was not quantified thus the data presented in FIG. 176 is represented as a dilution factor of the neat supernatant material. For Erbitux and the negative control antibody (Sigma i5154), purified material was used in the assay at the starting concentration of 2 μg/ml and 1 μg/ml respectively, which is equivalent to dilution factor of 1 in FIG. 176.

### Example 18

### Binding Activity Data of IL-13/IL-4 mAbdAbs where the ‘G and S’ Amino Acid Residues Have Been Removed

### 18.1 Construction of mAbdAbs

[0738] mAbdAbs were constructed in which the G and S amino acid residues (next to the linker sequence) were removed. Expression plasmids were constructed using standard molecular biology techniques. These mAbdAbs are described in Table 23. They were cloned, then expressed in one or more of HEK293-6E cells, CHOK1 cells, or CHOE1a cells, they were purified (as described in examples 1, 1.3 and 1.5 respectively) and analysed in a number of IL-13 and IL-4 activity assays.

TABLE 23

| | | Sequence ID |
|---|---|---|
| Name | Description | No. |
| PascoH-474 GS | H chain = Pascolizumab heavy chain-DOM10-53-474 | 91 (=H chain) |
| removed | dAb | 15 (=L chain) |
| | L chain = Pascolizumab light chain | |
| PascoH-TVAAPS- | H chain = Pascolizumab heavy chain-TVAAPS-DOM10- | 92 (=H chain) |
| 474 GS removed | 53-474 dAb | 15 (=L chain) |
| | L chain = Pascolizumab light chain | |
| PascoH-GS- | H chain = Pascolizumab heavy chain-GS-ASTKGPT- | 96 (=H chain) |
| ASTKGPT-474 2^{nd} | DOM10-53-474 dAb | 15 (=L chain) |
| GS removed | L chain = Pascolizumab light chain | |
| 586H-210 GS | H chain = Anti-human IL-13 mAb heavy chain-DOM9- | 87 (=H chain) |
| removed | 112-210 dAb | 13 (=L chain) |
| | L chain = Anti-human IL-13 mAb light chain | |
| 586H-TVAAPS-210 | H chain = Anti-human IL-13 mAb heavy chain-TVAAPS- | 88 (=H chain) |
| GS removed | DOM9-112-210 dAb | 13 (=L chain) |
| | L chain = Anti-human IL-13 mAb light chain | |

### 18.2 Expression and Purification

[0739] These mAbdAbs were purified and analysed by SEC and SDS PAGE. A number of purified preparations were made and the SEC and SDS PAGE data shown in FIGS. 90 to 98 are representative of these preparations.

### 18.3 Binding to Human IL-4 in a Direct Binding ELISA

[0740] Purified PascoH-474 GS removed and PascoH-TVAAPS-474 GS removed were tested for binding to human IL-4 in a direct binding ELISA as described in method 2 (PascoH-474, PascoH-TVAAPS-474, PascoH-ASTKG-474 and PascoH-ELQLE-474 were also tested for binding in this assay). A number of ELISA assays have been completed for these molecules, the data shown in FIG. 99 is representative of these assays.

[0741] PascoH-474 GS removed and PascoH-TVAAPS-474 GS removed, both bound human IL-4. Purified anti-human IL4 mAb alone (Pascolizumab) was included in this assay as a positive control for binding to IL-4. Purified anti-human IL13 mAb was included as a negative control for IL-4 binding. The binding activity of PascoH-474 GS removed and PascoH-TVAAPS-474 GS removed was similar to purified anti-IL4 mAb alone (Pascolizumab), PascoH-474, PascoH-TVAAPS-474, PascoH-ASTKG-474 and PascoH-ELQLE-474.

### 18.4 Binding to Human IL-13 in a Direct Binding ELISA

[0742] Purified PascoH-474 GS removed and PascoH-TVAAPS-474 GS removed were also tested for binding to human IL-13 in a direct binding ELISA as described in method 1 (PascoH-616 and PascoH-TVAAPS-616 were also tested for binding in this assay, the generation of these molecules is described in Example 19). A number of ELISA assays have been completed for these molecules, the data shown in FIG. 100 is representative of all assays.

[0743] PascoH-474 GS removed, PascoH-TVAAPS-474 GS removed, PascoH-616 and PascoH-TVAAPS-616 all bound to human IL-13. Purified anti-human IL4 mAb alone (Pascolizumab) was included in this assay as a negative control for binding to IL-13. Purified anti-human IL13 mAb was included as a positive control for IL-13 binding. Note that the anti-IL-13 dAb alone (DOM10-53-474) was not tested in this assay as the dAb is not detected by the secondary detection antibody; instead, the anti-human IL13 mAb was used as a positive control to demonstrate IL-13 binding in this assay.

### 18.5 Binding to Cynomolgus IL-13 in a Direct Binding ELISA

[0744] Purified PascoH-474 GS removed, PascoH-TVAAPS-474 GS removed, PascoH-616 and PascoH-TVAAPS-616 mAbdAbs were also tested for binding to cynomolgus IL-13 in a direct binding ELISA (as described in method 17). A number of ELISA assays have been completed for these molecules, the data shown in FIG. 101 is representative of all assays.

[0745] PascoH-474 GS removed, PascoH-TVAAPS-474 GS removed, PascoH-616 and PascoH-TVAAPS-616 all bound cynomolgus IL-13. Purified anti-human IL4 mAb alone (Pascolizumab) was included in this assay as a negative control for binding to IL-13. Purified anti-human IL13 mAb was included as a positive control for cynomolgus IL-13 binding. Note that the anti-IL-13 dAbs alone (DOM10-53-474 and DOM10-53-616) were not tested in this assay as the dAb is not detected by the secondary detection antibody; instead, the anti-human IL13 mAb was used as a positive control to demonstrate IL-13 binding in this assay.

### 18.6 Biacore Analysis for Binding to Human IL-4 and Human IL-13

[0746] Purified mAbdAbs were tested for binding to human IL-4 and human IL-13 using the BIAcore™ T100 at 25° C. (as described in methods 4 and 5). These data are shown in Table 24.

[0747] In experiment 1, a mAbdAb capture level of approximately 600 relative response units was achieved and six IL-13 and IL-4 concentration curves (256 nM, 64 nM, 16 nM, 4 nM, 1 nM and 0.25 nM) were assessed. Only one IL-13 (256 nM) and IL-4 (256 nM) concentration curve was assessed for the mAbs in experiment 1.

[0748] In experiment 2, a mAbdAb a capture level of approximately 400 relative response units was achieved and six IL-4 (64 nM, 16 nM, 4 nM, 1 nM, 0.25 nM and 0.0625 nM) and six IL-13 concentration curves (256 nM, 64 nM, 16 nM, 4 nM, 1 nM and 0.25 nM) were assessed. In experiment 2, only one IL-13 concentration curve (256 nM) was assessed for the anti-IL13 mAb and five IL-4 concentration curves (64 nM, 16 nM, 4 nM, 1 nM and 0.25 nM) were assessed for Pascolizumab.

[0749] In experiment 3, a mAbdAb or mAb capture level of approximately 700 relative response units was achieved and six IL-4 concentration curves (256 nM, 64 nM, 16 nM, 4 nM, 1 nM and 0.25 nM) and six IL-13 concentration curves (256 nM, 64 nM, 16 nM, 4 nM, 1 nM and 0.25 nM) were assessed.

TABLE 24

| Molecule | Binding affinity, KD (nM) | | | | | |
|---|---|---|---|---|---|---|
| (purified | Human IL-4 | | | Human IL-13 | | |
| material) | Experiment 1 | Experiment 2 | Experiment 3 | Experiment 1 | Experiment 2 | Experiment 3 |
| PascoH-474 | not done | 0.005 | not done | 0.3307 | 0.351 | not done |
| GS removed | | | | | | |
| PascoH- | not done | 0.011 | not done | 0.2677 | 0.305 | not done |
| TVAAPS-474 | | | | | | |
| GS removed | | | | | | |
| 586H-210 GS | not done | not done | very tight | not done | not done | 0.438 |
| removed | | | binder * | | | |
| 586H- | not done | not done | very tight | not done | not done | 0.501 |
| TVAAPS-210 | | | binder * | | | |
| GS removed | | | | | | |
| Anti-human | does not | does not | does not | 0.2799 | 0.3 | 0.547 |
| IL-13 mAb | bind | bind | bind | | | |
| Pascolizumab | 0.0137 | 0.011 | 0.013 | does not | does not | does not |
| | | | | bind | bind | bind |

[0750] In experiments 1 and 2, PascoH-474 GS removed and PascoH-TVAAPS-474 GS removed, both bound IL-4 with similar binding affinities and this was approximately equivalent to the binding affinity of the anti-human IL4 mAb alone (Pascolizumab). PascoH-474 GS removed and PascoH-TVAAPS-474 GS removed, also bound IL-13 with similar binding affinities. Note that the anti-IL-13 dAb alone (DOM10-53-474) was not tested in this assay as the dAb cannot be captured onto the Protein A or anti-human IgG coated CM5 chip; instead, the anti-human IL13 mAb was used as a positive control to demonstrate IL-13 binding in this assay.

[0751] In experiment 3, 586H-210 GS removed and 586H-TVAAPS-210 GS removed, both bound IL-13 with similar binding affinities and this was approximately equivalent to the binding affinity of the anti-human IL13 mAb. 586H-210 GS removed and 586H-TVAAPS-210 GS removed, also bound IL-4 very tightly, however this method was unable to determine the binding affinity due to positive dissociation effects and the sensitivity level of the BIAcore™ technique (*). Note that the anti-IL-4 dAb alone (DOM9-112-210) was not tested in this assay as the dAb cannot be captured onto the Protein A or anti-human IgG coated CM5 chip; instead, the anti-human IL4 mAb (Pascolizumab) was used as a positive control to demonstrate IL-4 binding in this assay.

### 18.7 Biacore Analysis for Binding to Cynomolgus IL-4 and Cynomolgus IL-13

[0752] Purified mAbdAbs were tested for binding to cynomolgus IL-4 and cynomolgus IL-13 using the BIAcore™ T100 at 25° C. (as described in methods 24 and 23). These data are shown in Table 25. A mAbdAb capture level of approximately 600 relative response units was achieved and six IL-13 concentration curves (256, 64, 16, 4, 1, 0.25 nM) and five IL-4 concentration curves (64, 16, 4, 1, 0.25 nM) were assessed.

TABLE 25

| | Binding affinity, KD | | | | | |
|---|---|---|---|---|---|---|
| Molecule | Cynomolgus IL-13 | | | Cynomolgus IL-4 | | |
| (purified | on rate | off rate | | on rate | off rate | |
| material) | (ka, Ms⁻¹) | (kd, s⁻¹) | KD (nM) | (ka, Ms⁻¹) | (kd, s⁻¹) | KD (pM) |
| PascoH-474 GS | 6.62E+5 | 1.10E−2 | 16.6 | 1.87E+6 | 6.38E−5 | 34.2 |
| removed | | | | | | |
| PascoH- | 4.83E+5 | 1.29E−2 | 26.7 | 1.83E+6 | 5.30E−5 | 29.0 |
| TVAAPS-474 | | | | | | |
| GS removed | | | | | | |
| PascoH- | 4.79E+5 | 1.14E−2 | 23.8 | 1.83E+6 | 5.30E−5 | 29.0 |
| ASTKGPT-474 | | | | | | |
| 2^{nd} GS removed | | | | | | |
| PascoH-474 | 5.86E+5 | 1.09E−2 | 18.6 | 1.85E+6 | 8.14E−5 | 43.9 |
| PascoH- | 4.33E+5 | 1.17E−2 | 27.1 | 1.80E+6 | 8.85E−5 | 49.1 |
| TVAAPS-474 | | | | | | |
| PascoH-ASTKG- | 3.64E+5 | 1.07E−2 | 29.5 | 1.78E+6 | 7.90E−5 | 44.5 |
| 474 | | | | | | |

[0753] PascoH-474 GS removed, PascoH-TVAAPS-474 GS removed, PascoH-ASTKGPT-474 2^{nd} GS removed, PascoH-474, PascoH-TVAAPS-474 and PascoH-ASTKG-474 all bound cynomolgus IL-4 with similar binding affinities. PascoH-474 GS removed, PascoH-TVAAPS-474 GS removed, PascoH-ASTKGPT-474 2^{nd} GS removed, PascoH-474, PascoH-TVAAPS-474 and PascoH-ASTKG-474, also all bound IL-13 with similar binding affinities.

[0754] Purified mAbdAbs were also tested for binding to cynomolgus IL-4 and cynomolgus IL-13 using the BIAcore™ T100 at 25° C. (as described in methods 24 and 23). These data are shown in Table 26. A mAbdAb capture level of approximately 600 relative response units was achieved and six IL13 and six IL-4 concentration curves (256, 64, 16, 4, 1 and 0.25 nM) were assessed.

TABLE 26

| | Binding affinity, KD | | | | | |
|---|---|---|---|---|---|---|
| Molecule | Cynomolgus IL-13 | | | Cynomolgus IL-4 | | |
| (purified | on rate | off rate | | on rate | off rate | |
| material) | (ka, Ms⁻¹) | (kd, s⁻¹) | KD (pM) | (ka, Ms⁻¹) | (kd, s⁻¹) | KD (pM) |
| 586H-TVAAPS- | 4.92E+5 | 2.86E−5 | 58 | very tight | very tight | very tight |
| 210 GS removed | | | | binder * | binder * | binder * |
| 586H-210 GS | 5.07E+5 | 2.24E−5 | 44 | very tight | very tight | very tight |
| removed | | | | binder * | binder * | binder * |
| Anti-IL13 mAb | 4.74E+5 | 1.05E−4 | 222 | does not | does not | does not |
| | | | | bind | bind | bind |
| Pascolizumab | does not | does not | does not | 2.34E+6 | 1.08E−4 | 46 |
| | bind | bind | bind | | | |

[0755] 586H-210 GS removed and 586H-TVAAPS-210 GS removed, both bound cynomolgus IL-13 with similar binding affinities; these mAbdAbs appeared to bind IL-13 more potently than the anti-human IL13 mAb, however in the case of the mAb only one concentration curve was completed which is inherently less accurate than a full concentration range assessment. 586H-210 GS removed and 586H-TVAAPS-210 GS removed, also bound IL-4 very tightly, however this method was unable to determine the binding affinity due to positive dissociation effects and the sensitivity level of the BIAcore™ technique (*). Note that the anti-IL-4 dAb alone (DOM9-112-210) was not tested in this assay as the dAb cannot be captured onto the Protein A or anti-human IgG coated CM5 chip; instead, the anti-human IL4 mAb (Pascolizumab) was used as a positive control to demonstrate IL-4 binding in this assay.

### 18.8 Biacore Analysis of Effect of IL-4 Binding to mAbdAbs on Subsequent IL-13 Binding Kinetics and Vice Versa; and the Effect of IL-13 Binding to mAbdAbs on Subsequent IL-4 Binding Kinetics and Vice Versa

[0756] The IL-13 and IL-4 BIAcore™ binding assays were also used to investigate the effect of IL-4 binding to PascoH-474 GS removed on subsequent IL-13 binding kinetics and vice versa; and the effect of IL-13 binding to 586H-TVAAPS-210 on subsequent IL-4 binding kinetics and vice versa. Analyses were carried out on the BIAcore™ T100 machine at 25° C., using anti-human IgG capture of the mAbdAb (or positive control mAb). Briefly, anti-human IgG was coupled onto a CM5 chip by primary amine coupling in accordance with the manufactures recommendations. mAbdAb constructs (or positive control mAb) were then captured onto this surface (at approximately 250 to 750 RUs) and the first analyte (either human IL-13 or human IL-4) was passed over at 256 nM for 4 minutes. The second analyte (human IL-4 or human IL-13 respectively) was then passed over at concentrations of 256 nM, 64 nM, 16 nM, 4 nM, 1 nM and 0.25 nM, and for double referencing a buffer injection was passed over the capture antibody or mAbdAb surface. The data was analysed (fitted to the 1:1 model of binding) using the evaluation software in the machine. The surface was then regenerated using 3M magnesium chloride. The data from these experiments are shown in Tables 27 and 28.

TABLE 27

| | IL-13 Binding Kinetics | | | | | |
|---|---|---|---|---|---|---|
| | with human IL-4 bound | | | without human IL-4 bound | | |
| | to molecule | | | to molecule | | |
| | on rate | off rate | KD | on rate | off rate | KD |
| Molecule | (ka, Ms⁻¹) | (kd, s⁻¹) | (pM) | (ka, Ms⁻¹) | (kd, s⁻¹) | (pM) |
| PascoH- | 5.66E+5 | 2.31E−4 | 407.7 | 6.09E+5 | 2.59E−4 | 425.2 |
| 474 GS | | | | | | |
| removed | | | | | | |
| 586H- | 9.68E+5 | 3.15E−4 | 325.2 | 9.09E+5 | 3.47E−4 | 381.3 |
| TVAAPS- | | | | | | |
| 210 | | | | | | |

| | | | | |
|---|---|---|---|---|
| Anti-IL13 | not tested | 1.01E+6 | 3.68E−4 | 366.1 |
| mAb | | | | |

[0757] The binding affinity of PascoH-474 GS removed for human IL-13 was similar, irrespective of whether human IL-4 was bound to this molecule or not. In addition, the binding affinity of 586H-TVAAPS-210 for human IL-13 was similar, irrespective of whether human IL-4 was bound to this molecule or not and it was also similar to the binding affinity of the anti-IL13 mAb for human IL-13.

[0758] The off-rates (kd) for IL-4 binding obtained for PascoH-474 GS removed and 586H-TVAAPS-210, are very slow and out of the sensitivity range of the BIAcore™ T100 hence could not be used as an accurate determination of the binding affinity (data not shown). However, the data do indicate that all of the constructs tested bind very tightly to human IL-4. Thus the binding affinity of PascoH-474 GS removed for human IL-4 was very tight, irrespective of whether human IL-13 was bound to this molecule or not. In addition, the binding affinity of 586H-TVAAPS-210 for human IL-4 was very tight, irrespective of whether human IL-13 was bound to this molecule or not.

### 18.9 Potency of mAbdAbs

[0759] mAbdAbs were tested for inhibition of human IL-4 binding to human IL-4Rα by ELISA, as described in Method 19. All of the molecules shown in Table 28 were tested in one experiment, however the data have been plotted on two graphs to distinguish between the curve plots (586H-TVAAPS-210 was run twice, this is labelled as sample 1 and sample 2 in table 25). These data are shown in FIGS. 102 and 103.

[0760] PascoH-474 GS removed, inhibited binding of human IL-4 to human IL4Rα similarly to Pascolizumab. 586H-210 GS removed, 586H-TVAAPS-210 GS removed, 586H-TVAAPS-210, 586H-210, 586H-G4S-210 and 586H-ASTKG-210 all inhibited binding of human IL-4 to human 1 L4Rα similarly to DOM9-112-210. Pascolizumab and DOM9-112-210 were included as positive controls for the inhibition of IL-4 binding to IL4Rα. DOM10-53-474 and an isotype-matched mAb (with specificity for an irrelevant antigen) were included as negative controls for the inhibition of IL-4 binding to IL4Rα.

[0761] These data were also used to determine IC₅₀ values for each molecule. The IC₅₀ value is the concentration of mAbdAb or mAb or dAb, which is able to inhibit binding of human IL-4 to human IL4Rα by 50%. The IC₅₀ values are shown in Table 28.

TABLE 28

| Molecule | IC₅₀ (nM) |
|---|---|
| PascoH-474 GS removed | 5.14 |
| Pascolizumab | 3.45 |
| DOM9-112-210 | 36.77 |
| 586H-210 | 26.79 |
| 586H-210 GS removed | 36.18 |
| 586H-TVAAPS-210 (sample 1) | 23.77 |
| 586H-TVAAPS-210 (sample 2) | 21.03 |
| 586H-TVAAPS-210 GS | 19.21 |
| removed | |
| 586H-ASTKG-210 | 27.32 |
| 586H-G4S-210 | 29.85 |
| DOM10-53-474 | No inhibition at concentration |
| | range tested |
| Negative control mAb | No inhibition at concentration |
| | range tested |

[0762] These data confirm that PascoH-474 GS removed behaves similarly to Pascolizumab and that all 586H-210 mAbdAb ‘family members’ behave similarly to the DOM9-112-210 dAb.

### 18.10 Neutralisation of Human and Cynomolgus IL-13 in TF-1 Cell Bioassays by mAbdAbs

[0763] A number of purified mAbdAbs were tested for neutralisation of human and cynomolgus IL-13 in TF-1 cell bioassays (as described in method 8 and method 20 respectively). Each molecule was tested between one and nine times in these assays, not all graphs are shown, but FIGS. 104 and 105 are representative graphs showing the neutralisation data for human IL-13 and cynomolgus IL-13 respectively. DOM10-53-474 was included as a positive control for neutralisation of human or cynomolgus IL-13 in the bioassays. A dAb with specificity for an irrelevant antigen (negative control dAb) was also included as a negative control for neutralisation of human or cynomolgus IL-13 in the bioassays. PascoH-474 GS removed, PascoH-TVAAPS-474 GS removed and PascoH-ASTKG-474 2^{nd} GS removed, as well as PascoH-616, PascoH-TVAAPS-616 and DOM10-53-616 (these are described in Example 19), fully neutralised the bioactivity of both human and cynomolgus IL-13 in TF-1 cell bioassays.

### 18.11 Neutralisation of Human and Cynomolgus IL-4 in TF-1 Cell Bioassays by mAbdAbs

[0764] A number of purified mAbdAbs were also tested for neutralisation of human and cynomolgus IL-4 in TF-1 cell bioassays (as described in method 9 and method 21 respectively). Each molecule was tested twice in these assays, not all graphs are shown, but FIGS. 106 and 107 are representative graphs (from the dataset) showing neutralisation data for human IL-4 and cynomolgus IL-4 respectively. The anti-IL13 mAb was included as a negative control and Pascolizumab was included as a positive control for neutralisation of human or cynomolgus IL-4 in the bioassays. In addition, PascoH-474, PascoH-TVAAPS-474, PascoH-ASTKG-474 and PascoH-G4S-474 were also tested for neutralisation of human and cynomolgus IL-4 in these bioassays.

[0765] PascoH-474 GS removed and PascoH-TVAAPS-474 GS removed, fully neutralised the bioactivity of both human and cynomolgus IL-4 in TF-1 cell bioassays. In addition PascoH-474, PascoH-TVAAPS-474, PascoH-ASTKG-474 and PascoH-G4S-474 also fully neutralised the bioactivity of human IL-4 in the TF-1 cell bioassay.

[0766] ND₅₀ values were derived based on data obtained from a number of different experiments. The ND₅₀ value is the concentration of mAbdAb or mAb or dAb, which is able to neutralise the bioactivity of IL-13 or IL-4 by 50%. The mean ND₅₀ value, the standard deviation (SD) and the number of times tested (n) are shown in table 29.

TABLE 29

| | Mean ND₅₀ value & standard deviation (nM) | | | | | | | |
|---|---|---|---|---|---|---|---|---|
| | human | | cyno | | human | | cyno | |
| | IL-13 | | IL-13 | | IL-4 | | IL-4 | |
| Molecule | mean (SD) | n | mean (SD) | n | mean (SD) | n | mean (SD) | n |
| PascoH-474 GS | 2.269 | 9 | 39.834 | 8 | 2.855 | 2 | 1.89 | 2 |
| removed | (0.763) | | (14.675) | | (1.464) | | (0.325) | |
| PascoH-TVAAPS- | 2.114 | 9 | 47.882 | 9 | 3.015 | 2 | 1.36 | 2 |
| 474 GS removed | (0.766) | | (13.181) | | (2.015) | | (0.41) | |

| | | | | | | |
|---|---|---|---|---|---|---|
| PascoH- | 1.37 | 1 | 21.49 | 1 | not done | not done |
| ASTKGPT-474 2^{nd} | | | | | | |
| GS removed | | | | | | |
| DOM10-53-474 | 1.035 | 4 | 10.495 | 4 | did not | did not |
| | (0.741) | | (6.958) | | neutralise | neutralise |

| Negative control | did | did not | not done | | not done | |
|---|---|---|---|---|---|---|
| dAb | not neutralise | neutralise | | | | |
| Pascolizumab | did not | did not | 1.36 | 2 | 2.615 | 2 |
| | neutralise | neutralise | (0.198) | | (2.242) | |

[0767] PascoH-474 GS removed, PascoH-TVAAPS-474 GS removed, and PascoH-ASTKGPT-474 2^{nd} GS removed, all fully neutralised the bioactivity of human and cynomolgus IL-13 in TF-1 cell bioassays. In addition, the neutralisation potencies (ND₅₀ values) of PascoH-474 GS removed, PascoH-TVAAPS-474 GS removed, and PascoH-ASTKGPT-474 2^{nd} GS removed, for human IL-13 were similar and within-fold of the ND₅₀ value for purified anti-IL13 dAb alone (DOM10-53-474).

[0768] PascoH-474 GS removed and PascoH-TVAAPS-474 GS removed, both fully neutralised the bioactivity of human and cynomolgus IL-4 in TF-1 cell bioassays. In addition, the neutralisation potencies (ND₅₀ values) of PascoH-474 GS removed and PascoH-TVAAPS-474 GS removed, for human IL-13 and cyno IL-13 were similar and within fold of the ND₅₀ value for Pascolizumab.

### 18.12 Ability of mAbdAbs to Inhibit Binding of Human IL-13 Binding to Human IL-13Rα2

[0769] The molecules listed in Table 30 were tested for inhibition of human IL-13 binding to human IL-13Rα2 by ELISA, as described in Method 22. All molecules were tested in one experiment. The data are shown in FIG. 108.

[0770] All mAbdAbs tested inhibited binding of human IL-13 to human IL13Rα2. The level of inhibition was similar to that of DOM10-53-474, DOM10-53-616 and the anti-IL13 mAb. Pascolizumab and a negative control dAb (with specificity for an irrelevant antigen), were included as negative controls for the inhibition of IL-13 binding to IL13Rα2.

[0771] These data were also used to determine IC₅₀ values for each molecule. The IC₅₀ value is the concentration of mAbdAb or mAb or dAb, which is able to inhibit binding of human IL-13 to human IL13Rα2 by 50%. The IC₅₀ values are shown in Table 30.

TABLE 30

| Molecule | IC₅₀ (nM) |
|---|---|
| PascoH-474 GS removed | 9.58 |
| PascoH-TVAAPS-474 GS | 7.41 |
| removed | |
| DOM10-53-474 | 7.61 |
| PascoH-616 | 6.41 |
| PascoH-TVAAPS-616 | 6.17 |
| DOM10-53-616 | 5.76 |
| Anti-IL13 mAb | 6.43 |
| Pascolizumab | No inhibition at concentration |
| | range tested |
| Negative control dAb | No inhibition at concentration |
| | range tested |

[0772] These data confirm that PascoH-474 GS removed, PascoH-TVAAPS-474 GS removed, PascoH-616 and PascoH-TVAAPS-616 behaved similarly to DOM10-53-474, DOM10-53-616 and the anti-IL13 mAb.

### Example 19

### mAbdAbs Containing the Anti-IL13 DOM10-53-616 dAb

### 19.1 Construction of mAbdAbs Containing the Anti-IL13 DOM10-53-616 dAb

[0773] Two anti-IL4 mAb-anti-IL13dAbs as set out in Table 31 were cloned from existing vectors by site-directed mutagenesis as described in example 1.

TABLE 31

| | | Sequence ID |
|---|---|---|
| Name | Description | No. |
| PascoH-616 | H chain = Pascolizumab heavy | 149 (=H chain) |
| | chain-DOM10-53-616 dAb | 15 (=L chain) |
| | L chain = Pascolizumab light chain | |
| PascoH-TVAAPS- | H chain = Pascolizumab | 150 (=H chain) |
| 616 | heavy chain-TVAAPS- | 15 (=L chain) |
| | DOM10-53-616 dAb | |
| | L chain = Pascolizumab light chain | |

### 19.2 Expression and Purification of mAbdAbs Containing the Anti-IL13 DOM10-53-616 dAb

[0774] These mAbdAbs were expressed in HEK293-6E cells and CHOE1a cells as described in example 1.3.

[0775] The mAbdAbs were purified and analysed by SEC and SDS PAGE. A number of purified preparations of PascoH-616 and PascoH-TVAAPS-616 mAbdAbs were made, the SEC and SDS PAGE data shown in FIGS. 109 (SEC profile for PascoH-616), 110 (SEC profile for PascoH-TVAAPS_{—}616), 111 (SDS PAGE for PascoH-616) and 112 (SDS PAGE for PascoH-TVAAPS-616), are representative of these preparations.

### 19.3 Binding of mAbdAbs to Human IL-13 in a Direct Binding ELISA

[0776] PascoH-616 and PascoH-TVAAPS-616 purified mAb dAbs were tested for binding to human IL-13 in a direct binding ELISA (as described in method 1). These data are shown in FIG. 113.

[0777] Purified PascoH-616 and PascoH-TVAAPS-616 both bound human IL-13. Purified anti-human IL4 mAb alone (Pascolizumab) was included in this assay as a negative control for binding to IL-13. Purified anti-human IL13 mAb was included as a positive control for IL-13 binding. Note that the anti-IL-13 dAb alone (DOM10-53-616) was not tested in this assay as the dAb is not detected by the secondary detection antibody; instead, the anti-human IL13 mAb was used as a positive control to demonstrate IL-13 binding in this assay.

### 19.4 Biacore Analysis for Binding to Human IL-4 and Human IL-13

[0778] Purified mAbdAbs were tested for binding to human IL-4 and human IL-13 using the BIAcore™ T100 at 25° C. (as described in methods 4 and 5). These data are shown in Table 32.

[0779] In experiment 1, a mAbdAb capture level of approximately 600 relative response units was achieved and six IL-13 and IL-4 concentration curves (256 nM, 64 nM, 16 nM, 4 nM, 1 nM and 0.25 nM) were assessed. Only one IL-13 (256 nM) and IL-4 (256 nM) concentration curve was assessed for the mAbs in experiment 1.

[0780] In experiment 2, a mAbdAb a capture level of approximately 400 relative response units was achieved and six IL-4 (64 nM, 16 nM, 4 nM, 1 nM, 0.25 nM and 0.0625 nM) and six IL-13 concentration curves (256 nM, 64 nM, 16 nM, 4 nM, 1 nM and 0.25 nM) were assessed. In experiment 2, only one IL-13 concentration curve (256 nM) was assessed for the anti-IL13 mAb and five IL-4 concentration curves (64 nM, 16 nM, 4 nM, 1 nM and 0.25 nM) were assessed for Pascolizumab.

TABLE 32

| | Binding affinity, KD (nM) | | | |
|---|---|---|---|---|
| Molecule | Human IL-4 | | Human IL-13 | |
| (purified material) | Experiment 1 | Experiment 2 | Experiment 1 | Experiment 2 |
| PascoH-616 | 0.00172 | Very tight | 0.1137 | 0.15 |
| | | binder | | |
| PascoH-TVAAPS-616 | 0.003 | 0.005 | 0.0497 | 0.056 |
| Anti-human IL-13 mAb | does not bind | does not bind | 0.2799 | 0.31 |
| Pascolizumab | 0.0137 | 0.011 | does not bind | does not bind |

[0781] PascoH-616 and PascoH-TVAAPS-616 both bound IL-4 with similar binding affinities and this was similar to the binding affinity of the anti-human IL4 mAb alone (Pascolizumab). PascoH-616 and PascoH-TVAAPS-616 both bound IL-13. Note that the anti-IL-13 dAb alone (DOM10-53-616) was not tested in this assay as the dAb cannot be captured onto the Protein A or anti-human IgG coated CM5 chip; instead, the anti-human IL13 mAb was used as a positive control to demonstrate IL-13 binding in this assay.

### 19.5 Biacore Analysis for Binding to Cynomolgus IL-13

[0782] Purified mAbdAbs were also tested for binding to cynomolgus IL-13 using the BIAcore™ T100 at 25° C. (as described in method and 30). These data are shown in Table 33. A mAbdAb capture level of approximately 400 relative response units was achieved and six IL-13 concentration curves (256, 64, 16, 4, 1 and 0.25 nM) were assessed. There was only one IL-13 concentration curve (256 nM) for the anti-IL13 mAb.

TABLE 33

| Molecule | Binding affinity for | | |
|---|---|---|---|
| (purified | cynomolgus IL-13 (KD) | | |
| material) | on rate (ka, Ms⁻¹) | off rate (kd, s⁻¹) | KD (nM) |
| PascoH-616 | 3.411E+5 | 1.842E−3 | 5.4 |
| PascoH- | 4.597E+5 | 4.514E−3 | 9.8 |
| TVAAPS-616 | | | |
| Anti-IL13 | 5.498E+5 | 6.549E−5 | 0.119 |
| mAb | | | |
| Pascolizumab | does not bind | does not bind | does not |
| | | | bind |

[0783] PascoH-616 and PascoH-TVAAPS-616 both bound cynomolgus IL-13 with similar binding affinities. Note that the anti-IL-13 dAb alone (DOM10-53-616) was not tested in this assay as the dAb cannot be captured onto the Protein A or anti-human IgG coated CM5 chip; instead, the anti-human IL13 mAb was used as a positive control to demonstrate IL-13 binding in this assay.

### 19.6 Neutralisation of Human and Cynomolgus IL-13 in TF-1 Cell Bioassays by mAbdAbs

[0784] Purified mAbdAbs were tested for neutralisation of human IL-13 and cynomolgus IL-13 in TF-1 cell bioassays (as described in method 8 and method 20 respectively). These molecules were tested 3 times in each assay, and FIG. 114 is a representative graph showing the neutralisation data for human IL-13. FIG. 114a is a representative graph showing the neutralisation data for cyno IL-13. DOM10-53-616 was included as a positive control for neutralisation of IL-13 in this bioassay. A dAb with specificity for an irrelevant antigen (negative control dAb) was also included as a negative control for neutralisation of IL-13 in this bioassay.

[0785] The mean ND₅₀ value, the standard deviation (SD) and the number of times tested (n) are shown in table 34.

TABLE 34

| Mean ND₅₀ value & standard | |
|---|---|
| deviation (nM) | |
| human IL-13 | cyno IL-13 |

| Molecule | mean (SD) | n | mean (SD) | n |
|---|---|---|---|---|
| PascoH-616 | 0.7956 | 3 | 9.23 | 3 |
| | (0.129) | | (1.422) | |
| PascoH-TVAAPS-616 | 0.722 | 3 | 14.477 | 3 |
| | (0.245) | | (2.847) | |
| DOM10-53-616 | 0.416 | 3 | 4.81 | 3 |
| | (0.144) | | (3.266) | |

| | | |
|---|---|---|
| Negative control dAb | did not | did not |
| | neutralise | neutralise |

[0786] Both PascoH-616 and PascoH-TVAAPS-616, as well as In addition mAbdAbs PascoH-TVAAPS-474 GS removed and PascoH-474 GS removed fully neutralised the bioactivity of human and cynomolgus IL-13 in TF-1 cell bioassays.

[0787] In addition, the neutralisation potencies (ND₅₀ values) of PascoH-616 and PascoH-TVAAPS-616 for human IL-13 were similar and within 2-fold of the ND₅₀ value for the purified anti-IL13 dAb alone (DOM10-53-616).

[0788] PascoH-616 and PascoH-TVAAPS-616 were also tested for inhibition of human IL-13 binding to human IL-13Rα2 by ELISA, as described in Method 22. These data are presented in Example 18.12

### Example 20

### Ability of mAbdAbs to Neutralise Human IL-13 or IL-4 in a Human Whole Blood Phospho STAT6 Bioassay

[0789] The ability of mAbdAbs to neutralise human IL-13 or IL-4 in a human whole blood phospho STAT6 bioassay was carried out as described in Method 16.

[0790] The IL-4 or IL-13 neutralisation potencies (ie. inhibition of IL-4 or IL-13 bioactivity) of 2 mAbdAb constructs (the purified anti-IL13 mAb-anti-IL4dAb, 586H-TVAAPS-210; and the purified anti-IL4 mAb-anti-IL13dAb, PascoH-474 GS removed) were determined. Purified anti-human IL-4 mAb (Pascolizumab) and purified anti-IL4 dAb (DOM9-112-210) were included as positive controls for neutralisation of rhIL-4 in this assay. Purified anti-human IL-13 mAb and purified anti-IL13 dAb (DOM10-53-474) were included as positive controls for neutralisation of rhIL-13. An isotype matched mAb mixed with a dAb (both with specificities for irrelevant antigens), were included as a negative control for neutralisation of rhIL-4 or rhIL-13. Each molecule was tested at least twice, using blood from different donors. FIGS. 115 to 124 are graphs showing representative data.

[0791] The purified mAbdAbs fully neutralised the bioactivity of rhIL-13 and rhIL-4.

[0792] As described in method 16, the ability of the test molecules to neutralise rhIL-13 or rhIL-4 bioactivity was expressed as the concentration of the molecules (e.g. mAbdAbs) required to neutralise 2 ng/mL of human IL-4 or human IL-13 by 50% (IC₅₀). These data are shown in Table 35. The combined mean IC₅₀ from all donors for each molecule is presented, along with the standard deviation.

TABLE 35

| | | Mean IC₅₀ | |
|---|---|---|---|
| | | (standard deviation) | Number of |
| Molecule | Target in assay | nM | donors |
| 586-TVAAPS-210 | IL-4 | 1.23 (0.6) | 3 |
| | IL-13 | 2.68 (1.2) | 3 |
| PascoH-474 GS | IL-4 | 7.95 (7.8) | 3 |
| removed | IL-13 | 2.78 (0.7) | 3 |
| Anti-IL13 mAb | IL-13 | 1.47 (0.4) | 3 |
| Pascolizumab | IL-4 | 2.44 (1.2) | 3 |
| DOM10-53-474 | IL-13 | 6.83 (2.2) | 2 |
| DOM9-112-210 | IL-4 | 3.51 (0.8) | 2 |
| Negative control | — | No inhibition shown | 4 |
| mAb | | | |
| Negative control | — | No inhibition shown | 4 |
| dAb | | | |

[0793] Comparison of IC₅₀ values indicated that 586-TVAAPS-210 inhibited IL-13 and IL-4 induced pSTAT-6 similarly to the anti-IL13 mAb and DOM9-112-210 (in the IL-13 and IL-4 whole blood assays respectively). Comparison of IC₅₀ data also indicated that PascoH-474 GS removed, inhibited IL-13 and IL-4 induced pSTAT-6 similarly to DOM10-53-474 and Pascolizumab (in the IL-13 and IL-4 whole blood assays respectively). The control mAb showed no inhibition up to the maximum concentration tested of 661 nM in all donors, and the control dAb showed no neutralisation up to the maximum concentration tested of 2291 nM in all donors.

### Example 21

### Rat PK studies of the Dual Targeting Anti-IL4/anti-IL13 mAbdAb

[0794] PascoH-G4S-474, PascoL-G4S-474, 586H-TVAAPS-210 and 586H-TVAAPS-154 were assessed in rat PK studies (as summarised in Table 35.1). In brief, male Sprague-Dawley rats (approximately 200 grams to 220 grams in weight) were given a single intravenous (i/v) administration of mAbdAb at a target dose level of 2 mg/kg. At allotted time points (0 hours through to 312 hours) 100 μl blood samples were withdrawn and processed for plasma. The rat plasma samples were evaluated for the presence of the test molecule in a human IgG detection assay, and/or an IL-13 ligand binding assay, and/or an IL-4 ligand binding assay. In addition, the PK profile in plasma for Pascolizumab (in rat) was also evaluated: in this case the rat plasma samples were evaluated for the presence of Pascolizumab in a human IgG detection assay and an IL-4 ligand binding assay.

[0795] In a first study, pascolizumab was given to 4 rats. In a second study, there were four treatment groups (2 mg/kg PascoH-G4S-474, 2 mg/kg PascoL-G4S-474, 2 mg/kg 586H-TVAAPS-210 and 2 mg/kg 586H-TVAAPS-154), with 4 rats in each group.

[0796] The PK parameters (shown in Table 35.1) were derived from plasma concentration-time profile data (which are not shown). Note that, some plasma samples were analysed more than once in these assays and the PK parameters in Table 35.1 were derived from only one of these datasets. Also note that the PK parameters have not been normalised for individual animal doses, instead nominal doses of 2 mg/kg have been assumed. Note that some technical difficulties were encountered with the IgG PK assay for PascoH-G4S-474 hence the concentrations may be overestimated. In addition, analysis of the IgG plasma concentration-time profiles was performed twice in some cases (at analysis 1 and analysis 2, as annotated in Table 35.1). Analysis of the plasma concentration-time profile data generated from the IL-13 and IL-4 ligand binding PK assays was only performed at analysis 2. The plasma concentration-time profile data generated from the IL-13 and IL-4 ligand binding assays for PascoL-G4S-474 and 586H-TVAAPS-154 have not been used to derive PK parameters for these molecules.

TABLE 35.1

| | | | | | | | | Mean |
|---|---|---|---|---|---|---|---|---|
| | | | | | AUC | AUC | | residence |
| | | | T½ | Cmax | (last) | (extrap) | Clearance | time |
| Molecule | Assay | Analysis | (hr) | (ng/mL) | (ng · h/mL) | (%) | (mL/hr/kg) | (hr) |
| PascoH-G4S- | IgG | 1 | 129 | 60950 | 3430345 | 18.7 | 0.49 | 83 |
| 474 | IL-4 | 2 | 117 | 21975 | 1231243 | 17.2 | 1.42 | 83 |
| | IL-13 | 2 | 87 | 22050 | 1328651 | 13.2 | 1.36 | 85 |
| 586H- | IgG | 1 | 134 | 42400 | 1932615 | 21.9 | 0.81 | 88 |
| TVAAPS-210 | IgG | 2 | 92 | 42400 | 2215579 | 16.1 | 0.76 | 82 |
| | IL-4 | 2 | 60 | 41350 | 1674740 | 20.9 | 1.08 | 77 |
| | IL-13 | 2 | 101 | 31125 | 1515155 | 16.0 | 1.13 | 83 |
| Pascolizumab | IgG | 1 | 188 | 45150 | 3528174 | 31.9 | 0.39 | 110 |
| | IgG | 2 | 193 | 45150 | 3496503 | 34.9 | 0.38 | 109 |
| | IL-4 | 2 | 136 | 42825 | 2590114 | 30.6 | 0.54 | 110 |
| PascoL-G4S- | IgG | 1 | 69 | 42550 | 2539978 | 6.8 | 0.75 | 87 |
| 474 | | | | | | | | |
| 586H- | IgG | 1 | 166 | 43900 | 3315164 | 41.7 | 0.36 | 93 |
| TVAAPS-154 | | | | | | | | |

[0797] Plasma concentration-time profile data, generated in the IL-13 and IL-4 assays for PascoH-G4S-474 (and subsequent derived PK parameters), tended to be comparable; this was also the case for the plasma concentration-time profile data generated in the IL-13, IL-4 and IgG PK assays for 586H-TVAAPS-210 (and subsequent derived PK parameters). This suggests that these mAbdAbs were ‘intact’ in the rat plasma throughout the course of the study. The derived PK parameters for 586H-TVAAPS-154 appeared to be more similar to the derived PK parameters for Pascolizumab than any of the other mAbdAbs.

### Example 22

### Cyno PK Studies

[0798] PK studies were carried out in cynomolgus monkeys. The animals were given a single intravenous administration at a target dose level of 1 mg/kg. At allotted time points, 500 μl blood samples were withdrawn and processed for plasma. The cynomolgus plasma samples were then evaluated for the presence of the test molecule in an IL-13 ligand binding assay, an IL-4 ligand binding assay and an IL-13/IL-4 bridging assay. Preliminary data from these studies with the mAbdAbs ‘PascoH-474 GS removed’ and ‘586H-TVAAPS-210’ are consistent with the rat PK data shown above and indicated that these molecules are cleared from the systemic circulation more rapidly than a mAb but less rapidly than a dAb.

### Example 23

### 23.1 Generation of a Dual Targeting Anti-EGFR/Anti-VEGF mAbdAb

[0799] This dual targeting mAbdAb was constructed by fusion of a dAb to the C-terminus of the mAb heavy chain. The anti-EGFR mAb heavy and light chain expression cassettes had been previously constructed. The restriction sites which were used for cloning are the same as those set out in Example 10 (SalI and HindIII). DNA coding an anti-VEGF dAb (DOM15-26-593) was then amplified by PCR (using primers coding SalI and HindIII ends) and inserted into the modified 3′ coding region, resulting in a linker of ‘STG’ (serine, threonine, glycine) between the mAb and the dAb.

[0800] Sequence verified clones (SEQ ID NO: 164 and 243) for light and heavy chains respectively) were selected and large scale DNA preparations were made using Qiagen Mega Prep Kit following the manufacturer's protocols. mAbdAbs were expressed in mammalian HEK293-6E cells using transient transfection techniques by co-transfection of light and heavy chains (SEQ ID NO: 165 and 137).

### 23.2 Purification and SEC Analysis of the Dual Targeting Anti-EGFR/Anti-VEGF mAbdAb

[0801] This dual targeting mAbdAb was purified from clarified expression supernatant using Protein-A affinity chromatography according to established protocols. Concentrations of purified samples were determined by spectrophotometry from measurements of light absorbance at 280 nm. SDS-PAGE analysis (FIG. 128) of the purified sample (designated DMS4010) shows non-reduced sample running at ˜170 kDa whilst reduced sample shows two bands running at ˜25 and ˜60 kDa corresponding light chain and dAb-fused heavy chain respectively.

[0802] For size exclusion chromatography (SEC) analysis the anti-EGFR/anti-VEGF mAbdAb was applied onto a S-200 10/300 GL column (attached to an HPLC system) pre-equilibrated and running in PBS at 1 ml/min. The SEC profile shows a single species running as a symmetrical peak (FIG. 129).

### 23.3 Potency of the Dual Targeting Anti-EGFR/Anti-VEGF mAbdAb

[0803] The ability of the molecule to neutralise VEGF and EGFR were determined as described in methods 12 and 13 respectively. Assay data were analysed using GraphPad Prism. Potency values were determined using a sigmoidal dose response curve and the data fitted using the best fit model. Anti-EGFR potency (FIG. 130) of this mAbdAb (designated DMS4010) was calculated to be 4.784 nM whilst the control, an anti-EGFR mAb gave an EC50 value of 4.214 nM. In the anti-VEGF receptor binding assay (FIG. 131) the EC50 of the mAbdAb (designated DMS4010) was 58 pM (0.058 nM) whilst an anti-VEGF control mAb produced an EC50 of 214.1 pM (0.2141 nM). In conclusion, assay data shows that the construct of example 23, a dual targeting anti-EGFR/anti-VEGF mAbdAb is potent against both antigens.

### 23.4 PK of the Dual Targeting Anti-EGFR/Anti-VEGF mAbdAb

[0804] The pharmacokinetic profile of the dual targeting anti-EGFR/anti-VEGF mAbdAb (designated DMS4010) was determined after administration to cynomolgus monkeys. The compound was administered at a dose of 5 mg/kg i.v. and the serum levels of drug at multiple time points post-administration was determined by binding to both EGFR and VEGF in separate ELISA assays. FIG. 132 shows the results for this assay in which the data was compared with historical data that had been generated for the mAbs cetuximab (anti-EGFR) and bevacizumab (anti-VEGF). Further details are shown in table 36.

TABLE 36

| | | Half | Cmax | | Clearance | % AUC |
|---|---|---|---|---|---|---|
| | | Life | (ug/ | AUC (0-inf) | (mL/ | Extra- |
| | Antigen | (hr) | mL) | (hr * ug/mL) | hr/kg) | polated |
| cetuximab | EGFR | 43.6 | 151.4 | 5684.3 | 0.9 | 18.4 |
| bevacizumab | VEGF | 238.7 | 167.4 | 24201.9 | 0.2 | 13.4 |
| DMS4010 | EGFR | 7.5 | 89.7 | 623.2 | 8.1 | 5.2 |
| DMS4010 | VEGF | 6.7 | 125.5 | 733.8 | 7 | 7.2 |

### 23.5 Generation of an Alternative Anti-EGFR/Anti-VEGF mAbdAb

[0805] An alternative anti-EGFR/anti-VEGF mAbdAb was constructed in a similar way to that described above in Example 11.1, using the same anti-EGFR mAb linked to a VEGF dAb on the C-terminus of the heavy chain using an STG linker. The anti-VEGF dAb used in this case was DOM15-10-11. This molecule was expressed in mammalian HEK293-6E cells using transient transfection techniques by co-transfection of light and heavy chains (SEQ ID NO: 165 and 186), however significantly reduced levels of expression were achieved in comparison to the expression of the molecule described in Example 23.2. When tested for potency in the same VEGF assay as described in Example 23.3 it was found to have undetectable levels of inhibition of VEGF binding to VEGF receptor in this assay.

### Example 24

### 24.1 Generation of a Dual Targeting Anti-EGFR/Anti-VEGF mAbdAb with No Linker

[0806] A derivative of the mAbdAb described above in Example 23 was made where the ‘STG’ linker between the dAb and the C_{H}3 domain of the mAb was removed. SDM was used to delete the residues encoding the STG linker from the plasmid encoding the heavy chain. Sequence verified clones for light and heavy chains (SEQ ID NO: 243 and SEQ ID NO: 174) respectively were selected and large scale DNA preparations were made using Qiagen Mega Prep Kit following the manufacturer's protocols. mAbdAbs were expressed in mammalian HEK293-6E cells using transient transfection techniques by co-transfection of light and heavy chains (SEQ ID NO: 175 and 137).

### 24.2 Purification and SEC Analysis of the Dual Targeting Anti-EGFR/Anti-VEGF mAbdAb with No Linker

[0807] This dual targeting mAbdAb was purified from clarified expression supernatant using Protein-A affinity chromatography according to established protocols. Concentrations of purified samples were determined by spectrophotometry from measurements of light absorbance at 280 nm. SDS-PAGE analysis (FIG. 133) of the purified sample (designated DMS4011) shows non-reduced sample running at 170 kDa whilst reduced sample shows two bands running at ˜25 and ˜60 kDa corresponding light chain and dAb-fused heavy chain respectively.

[0808] For size exclusion chromatography (SEC) analysis the anti-EGFR/anti-VEGF mAbdAb was applied onto a S-200 10/300 GL column (attached to an HPLC system) pre-equilibrated and running in PBS at 1 ml/min. The SEC profile shows a single species running as a symmetrical peak (FIG. 134).

### 24.3 Potency of the Dual Targeting Anti-EGFR/Anti-VEGF mAbdAb with No Linker

[0809] The ability of the molecule to neutralise VEGF and EGFR were determined as described in methods 12 and 13 respectively. Assay data were analysed using GraphPad Prism. Potency values were determined using a sigmoidal dose response curve and the data fitted using the best fit model. Anti-EGFR potency (FIG. 135) of this mAbdAb (designated DMS4011) was calculated to be 3.529 nM whilst the control, an anti-EGFR mAb gave an EC50 value of 3.647 nM. In the anti-VEGF receptor binding assay (FIG. 136) the EC50 of the mAbdAb (designated DMS4011) was 342.9 pM (0.3429 nM) whilst an anti-VEGF control mAb produced an EC50 of 214.1 pM (0.2141 nM). In conclusion, assay data shows that the construct of example 24, a dual targeting anti-EGFR/anti-VEGF mAbdAb with no linker is potent against both antigens.

### Example 25

### 25.1 Generation of a Dual Targeting Anti-EGFR/Anti-VEGF mAbdAb with Longer Linkers

[0810] Derivatives of the mAbdAb described above in Example 23 were made where the linker between the dAb and the C_{H}3 domain of the mAb was lengthened by the insertion of one or two repeats of a flexible “GGGGS” motif into the plasmid encoding the heavy chain. The first molecule with a heavy chain sequence as set out in SEQ ID NO: 175 has one repeat of this motif, hence having a linker of ‘STGGGGGS’.

[0811] The second molecule with a heavy chain sequence as set out in SEQ ID NO: 177 has two repeats of this motif, hence having a linker of ‘STGGGGGSGGGGS’.

[0812] These were both indepentyl paired with the same light chain as used in Example 23 (SEQ ID NO: 243)

[0813] Sequence verified clones for light and heavy chains were selected and large scale DNA preparations were made using Qiagen Mega Prep Kit following the manufacturer's protocols. mAbdAbs were expressed in mammalian HEK293-6E cells using transient transfection techniques by co-transfection of light and heavy chains (SEQ ID NO: 176 and 137 which is designated DMS4023; and SEQ ID NO: 178 and 137 which is designated DMS4024).

### 25.2 Purification and SEC Analysis of the Dual Targeting Anti-EGFR/Anti-VEGF mAbdAb with Longer Linkers

[0814] These dual targeting mAbdAbs were purified from clarified expression supernatant using Protein-A affinity chromatography according to established protocols. Concentrations of purified samples were determined by spectrophotometry from measurements of light absorbance at 280 nm. SDS-PAGE analysis of the purified samples DMS4023 and DMS4024 (FIG. 137) shows non-reduced samples running at ˜170 kDa whilst reduced samples show two bands running at ˜25 and ˜60 kDa corresponding light chain and dAb-fused heavy chain respectively.

[0815] For size exclusion chromatography (SEC) analysis the anti-EGFR/anti-VEGF mAbdAb was applied onto a S-200 10/300 GL column (attached to an HPLC system) pre-equilibrated and running in PBS at 1 ml/min. The SEC profile for both DMS4023 (FIG. 138) and DMS4024 (FIG. 139) show a single species with a slightly trailing peak.

### 25.3 Potency of the Dual Targeting Anti-EGFR/Anti-VEGF mAbdAb with Longer Linkers

[0816] The ability of the molecule to neutralise VEGF and EGFR were determined as described in methods 12 and 13 respectively. Assay data were analysed using GraphPad Prism. Potency values were determined using a sigmoidal dose response curve and the data fitted using the best fit model. Anti-EGFR potency (FIG. 140) of the mAbdAb DMS4023 was calculated to be 7.066 nM and the potency of mAbdAb DMS4024 was calculated to be 6.420 nM whilst the control, an anti-EGFR mAb gave an EC50 value of 7.291 nM. In the anti-VEGF receptor binding assay (FIG. 141) the EC50 of the mAbdAb DMS4023 was 91.79 pM (0.091 nM) and the EC50 of the mAbdAb DMS4024 was 90 pM (0.0906 nM) whilst an anti-VEGF control mAb produced an EC50 of 463.2 pM (0.4632 nM). In conclusion, assay data shows that the constructs of example 25, dual targeting anti-EGFR/anti-VEGF mAbdAbs with longer linkers are potent against both antigens.

### Example 26

### 26.1 Generation of a Dual Targeting Anti-VEGF/Anti-EGFR mAbdAb

[0817] This dual targeting mAbdAb was constructed by fusion of a dAb to the C-terminus of the mAb heavy chain. The anti-VEGF mAb heavy and light chain expression cassettes had been previously constructed. The restriction sites which were used for cloning are the same as those set out in Example 10 (SalI and HindIII).

[0818] DNA coding an anti-EGFR dAb (DOM16-39-542) was then amplified by PCR (using primers coding SalI and HindIII ends) and inserted into the modified 3′ coding region, resulting in a linker of ‘STG’ (serine, threonine, glycine) between the mAb and the dAb.

[0819] Sequence verified clones (SEQ ID NO: 179 and 181) for light and heavy chains respectively) were selected and large scale DNA preparations were made using Qiagen Mega Prep Kit following the manufacturer's protocols. mAbdAbs were expressed in mammalian HEK293-6E cells using transient transfection techniques by co-transfection of light and heavy chains (SEQ ID NO: 180 and 182).

### 26.2 Purification and SEC Analysis of the Dual Targeting Anti-VEGF/Anti-EGFR mAbdAb

[0820] These dual targeting mAbdAbs were purified from clarified expression supernatant using Protein-A affinity chromatography according to established protocols. Concentrations of purified samples were determined by spectrophotometry from measurements of light absorbance at 280 nm. SDS-PAGE analysis of the purified sample (designated DMS4009) (FIG. 142) shows non-reduced samples running at ˜170 kDa whilst reduced samples show two bands running at ˜25 and ˜60 kDa corresponding light chain and dAb-fused heavy chain respectively.

[0821] For size exclusion chromatography (SEC) analysis the anti-EGFR/anti-VEGF mAbdAb was applied onto a S-200 10/300 GL column (attached to an HPLC system) pre-equilibrated and running in PBS at 1 ml/min. The SEC profile for this molecule (FIG. 143) shows a single species with a symmetrical peak.

### 26.3 Potency of the Dual Targeting Anti-VEGF/Anti-EGFR mAbdAb

[0822] The ability of the molecule to neutralise VEGF and EGFR were determined as described in methods 12 and 13 respectively. Assay data were analysed using GraphPad Prism. Potency values were determined using a sigmoidal dose response curve and the data fitted using the best fit model. Anti-EGFR potency (FIG. 144) of the mAbdAb DMS4009 was calculated to be 132.4 nM whilst the control, an anti-EGFR mAb gave an EC50 value of 6.585 nM. In the anti-VEGF receptor binding assay (FIG. 145) the EC50 of the mAbdAb was 539.7 pM (0.5397 nM) whilst an anti-VEGF control mAb produced an EC50 of 380.5 pM (0.3805 nM). In conclusion, assay data shows that the construct of example 26, a dual targeting anti-VEGF/anti-EGFR mAbdAb is potent against both antigens.

### Example 27

### 27.1 Generation of a Dual Targeting Anti-EGFR/Anti-IL-13 mAbdAb

[0823] This dual targeting mAbdAb was constructed by fusion of a dAb to the C-terminus of the mAb heavy chain. The anti-EGFR mAb heavy and light chain expression cassettes had been previously constructed. The restriction sites which were used for cloning are the same as those set out in Example 10 (SalI and HindIII).

[0824] DNA coding an anti-IL-13 dAb (DOM10-53-474) was then amplified by PCR (using primers coding SalI and HindIII ends) and inserted into the modified 3′ coding region, resulting in a linker of ‘STG’ (serine, threonine, glycine) between the mAb and the dAb. Sequence verified clones (SEQ ID NO: 243 and 183) for light and heavy chains respectively) were selected and large scale DNA preparations were made using Qiagen Mega Prep Kit following the manufacturer's protocols. mAbdAbs were expressed in mammalian HEK293-6E cells using transient transfection techniques by co-transfection of light and heavy chains (SEQ ID NO: 137 and 184).

### 27.2 Purification and SEC Analysis of the Dual Targeting Anti-EGFR/Anti-IL-13 mAbdAb

[0825] These dual targeting mAbdAbs were purified from clarified expression supernatant using Protein-A affinity chromatography according to established protocols. Concentrations of purified samples were determined by spectrophotometry from measurements of light absorbance at 280 nm. SDS-PAGE analysis of the purified sample (designated DMS4029) (FIG. 146) shows non-reduced samples running at ˜170 kDa whilst reduced samples show two bands running at ˜25 and ˜60 kDa corresponding light chain and dAb-fused heavy chain respectively.

[0826] For size exclusion chromatography (SEC) analysis the anti-EGFR/anti-IL-13 mAbdAb was applied onto a S-200 10/300 GL column (attached to an HPLC system) pre-equilibrated and running in PBS at 0.5 ml/min. The SEC profile for this molecule (FIG. 147) shows a single species with a symmetrical peak.

### 27.3 Potency of the Dual Targeting Anti-EGFR/Anti-IL-13 mAbdAb

[0827] The ability of the molecule to neutralise EGFR and IL-13 were determined as described in methods 13 and 25 respectively. Assay data were analysed using GraphPad Prism. Potency values were determined using a sigmoidal dose response curve and the data fitted using the best fit model. Anti-EGFR potency (FIG. 148) of the mAbdAb DMS4029 was calculated to be 9.033 nM whilst the control, an anti-EGFR mAb gave an EC50 value of 8.874 nM. In the IL-13 cell-based neutralisation assay (FIG. 149) the EC50 of the mAbdAb was 1.654 nM whilst an anti-IL-13 control dAb produced an EC50 of 0.996 nM. In conclusion, assay data shows that the construct of example 27, a dual targeting anti-EGFR/anti-IL-13 mAbdAb is potent against both antigens.

### Example 28

### 28.1 Generation of a Dual Targeting Anti-EGFR/Anti-VEGF mAbdAbs where the dAb is Located on the Light Chain

[0828] Dual targeting anti-EGFR/anti-VEGF mAbdAbs were constructed by fusion of a dAb to the C-terminus of the mAb light chain. The anti-EGFR mAb heavy and light chain expression cassettes had been previously constructed.

[0829] To introduce restriction sites for dAb insertion in the light chain, site directed mutagenesis was used to create BamHI and HindIII cloning sites using the mAb light chain expression vector as a template. DNA coding an anti-VEGF dAb (DOM15-26-593) was then amplified by PCR (using primers coding BamHI and HindIII ends) and inserted into the modified 3′ coding region, resulting in a linker of either ‘GSTG’ or ‘GSTVAAPS’ between the mAb and the dAb.

[0830] The first molecule with a light chain sequence as set out in SEQ ID NO: 187 has a linker of ‘GSTG’.

[0831] The second molecule with a light chain sequence as set out in SEQ ID NO: 189 has a linker of ‘GSTVAAPS’.

[0832] These were both independently paired with the heavy chain of SEQ ID NO: 245.

[0833] Sequence verified clones for light and heavy chains were selected and large scale DNA preparations were made using Qiagen Mega Prep Kit following the manufacturer's protocols. mAbdAbs were expressed in mammalian HEK293-6E cells using transient transfection techniques by co-transfection of light and heavy chains (SEQ ID NO: 188 and 139 which is designated DMS4013; and SEQ ID NO: 190 and 139 which is designated DMS4027).

### 28.2 Purification and SEC Analysis of the Dual Targeting Anti-EGFR/Anti-VEGF mAbdAbs where the dAb is Located on the Light Chain

[0834] These dual targeting mAbdAbs were purified from clarified expression supernatant using Protein-A affinity chromatography according to established protocols. Concentrations of purified samples were determined by spectrophotometry from measurements of light absorbance at 280 nm. SDS-PAGE analysis of the purified samples DMS4013 and DMS4027 (FIG. 150) shows non-reduced samples running at ˜170 kDa whilst reduced samples show two bands running at ˜38 and ˜50 kDa corresponding to dAb-fused light chain and heavy chain respectively.

[0835] For size exclusion chromatography (SEC) analysis the anti-EGFR/anti-VEGF mAbdAb was applied onto a S-200 10/300 GL column (attached to an HPLC system) pre-equilibrated and running in PBS at 1 ml/min. The SEC profile for both DMS4013 (FIG. 151) and DMS4027 (FIG. 152) show a single species with a symmetrical peak.

### 28.3 Potency of the Dual Targeting Anti-EGFR/Anti-VEGF mAbdAbs where the dAb is Located on the Light Chain

[0836] The ability of the molecule to neutralise VEGF and EGFR were determined as described in methods 12 and 13 respectively. Assay data were analysed using GraphPad Prism. Potency values were determined using a sigmoidal dose response curve and the data fitted using the best fit model. Anti-EGFR potency (FIG. 153) of the mAbdAb DMS4013 was calculated to be 7.384 nM and the potency of mAbdAb DMS4027 was calculated to be 7.554 nM whilst the control, an anti-EGFR mAb gave an EC50 value of 7.093 nM. In the anti-VEGF receptor binding assay (FIG. 154) the EC50 of the mAbdAb DMS4013 was 1.179 nM and the EC50 of the mAbdAb DMS4027 was 0.1731 nM whilst an anti-VEGF control mAb produced an EC50 of 0.130 nM. In conclusion, assay data shows that the constructs of example 28, dual targeting anti-EGFR/anti-VEGF mAbdAbs where the dAb is located on the light chain are potent against both antigens.

### Example 29

### Biacore Analysis of Dual Targeting Anti-EGFR/Anti-VEGF and Anti-TNF/Anti-VEGF mAbdAbs

[0837] The mAbdAbs described in example 11 (anti-TNF/anti-VEGF mAbdAb) and examples 23, 24, 25 and 28 (anti-EGFR/anti-VEGF mAbdAbs) were subjected to BIAcore analysis to determine kinetic association and dissociation constants for binding to their corresponding antigens. Analysis was performed on BIAcore™ 3000 instrument. The temperature of the instrument was set to 25° C. HBS-EP buffer was used as running buffer. Experimental data were collected at the highest possible rate for the instrument. One flow cell on a research grade CM5 chip was coated with protein A using standard amine coupling chemistry according to manufacturers instructions, and a second flow cells was treated equally but buffer was used instead of protein A to generate a reference surface. The flow cell coated with protein A was then used to capture mAbdAbs. Antigen was injected as a series 2× serial dilutions as detailed in table 37. Several dilutions were run in duplicate. Injections of buffer alone instead of ligand were used for background subtraction. Samples were injected in random order using the kinetics Wizard inherent to the instrument software. The surface was regenerated at the end of each cycle by injecting 10 mM Glycine, pH 1.5. Both data processing and kinetic fitting were performed using BIAevaluation software 4.1. Data showing averages of duplicate results (from the same run) is shown in Table 37. The multiple values shown for DMS4010 represent two experiments run on separate occasions. The value of 787 nM probably overestimates the affinity due to the concentrations of ligand analysed.

TABLE 37

| | | | | | | Top | |
|---|---|---|---|---|---|---|---|
| mAbdAb | Molecule | | | | KD | concentration | # |
| Example | number | Antigen | Ka [1/Ms] | Kd [1/s] | [pM] | (nM) | dilutions |
| 11 | 4000 | TNF | 3.65E+05 | 4.16E−05 | 112 | 10 | 6 |
| 23 | 4010 | EGFR | 1.47E+06 | 1.16E−03 | 787 | 1.25 | 5 |
| 23 | 4010 | EGFR | 3.14E+05 | 1.16E−03 | 3700 | 10 | 6 |
| 24 | 4011 | EGFR | 1.81E+05 | 1.11E−03 | 6120 | 5 | 6 |
| 28 | 4013 | EGFR | 2.20E+05 | 1.17E−03 | 5310 | 20 | 5 |
| 28 | 4013 | EGFR | 3.01E+05 | 1.40E−03 | 4650 | 10 | 7 |
| 25 | 4023 | EGFR | 2.38E+05 | 1.10E−03 | 4630 | 5 | 7 |
| 25 | 4024 | EGFR | 2.34E+05 | 1.10E−03 | 4700 | 10 | 6 |
| 28 | 4027 | EGFR | 2.80E+05 | 1.14E−03 | 4060 | 20 | 7 |
| 11 | 4000 | VEGF | 9.19E+05 | 4.78E−04 | 520 | 2.5 | 5 |
| 23 | 4010 | VEGF | 9.85E+05 | 1.90E−04 | 193 | 10 | 8 |
| 24 | 4011 | VEGF | 6.17E+05 | 1.26E−04 | 204 | 10 | 8 |
| 28 | 4013 | VEGF | 7.62E+05 | 3.64E−04 | 478 | 2 | 5 |
| 25 | 4023 | VEGF | 1.60E+06 | 2.40E−04 | 150 | 2 | 6 |
| 25 | 4024 | VEGF | 1.01E+06 | 2.30E−04 | 224 | 2 | 4 |
| 28 | 4027 | VEGF | 7.47E+05 | 2.23E−04 | 229 | 2 | 5 |

### Example 30

### Trispecific Antibodies which Comprise Single Domain Antibodies Fused Onto a Bispecific Antibody Scaffold

### 30.1 Construction

[0838] Genes encoding variable heavy and light domains of a bispecific antibody molecule which has specificity for IL-18 and IL-12 antigens (for further information see WO 2007/024715) were constructed de-novo with appropriate restriction enzyme sites and signal sequence added. Using standard molecular biology techniques, the variable heavy domains were cloned into an expression vector containing the IgG1 heavy chain constant region fused to an anti-IL4 domain antibody DOM9-112-210 (SEQ ID NO: 4) via a TVAAPS linker at the c-terminus of the constant region. The light chain variable domain was similarly cloned into an expression vector containing the Ck constant region sequence. The antibodies constructed and expressed are listed in Table 38.

TABLE 38

| | | SED ID NO: of |
|---|---|---|
| | | amino acid |
| Antibody ID | Description | sequence |
| BPC1616 | IL-12/18 DVDH TVAAPS-210 | 193 |
| | heavy chain | |
| | IL-12/18 DVD Kappa light chain | 194 |

### 30.2 Expression and Purification

[0839] Briefly, 25 ml of HEK293 cells at 1.5×10⁶ cells/ml were co-transfected with heavy and light chain expression plasmids previously incubated with 293fectin reagent (Invitrogen #51-0031). These were placed in a shaking incubator at 37° C., 5% CO₂, and 95% RH. After 24 hours Tryptone feeding media was added and the cells grown for a further 48 hours. Supernatant was harvested by centrifugation and IgG levels quantified by ELISA. The resulting mAbdAb was designated BPC1616 (SEQ ID NO: 193 and 194)

### 30.3 IL-12 Binding ELISA

[0840] The cell supernatant from the transfections were assessed for binding to recombinant human IL-12. Briefly, ELISA plates coated with anti-human IL-12 (R&D Systems AF219NA) at 2 μg/ml and blocked with blocking solution (4% BSA in Tris buffered saline). The plates were then loaded with 25 ng/ml recombinant human IL-12 (PeproTech #200-12) in blocking solution. The plate was incubated for 1 hour at room temp before washing in TBS+0.05% Tween 20 (TBST). Various dilutions of the cell supernatant were added as well as irrelevant control antibodies (Pascolizumab and an isotyped matched control hIgG) diluted in blocking solution. The plate was incubated for 1 hour at room temperature before washing in TBST. Binding was detected by the addition of a peroxidase labelled anti human kappa light chain antibody (Sigma A7164) at a dilution of 1/1000 in blocking solution. The plate was incubated for 1 hour at room temp before washing in TBST. The plate was developed by addition of OPD substrate (Sigma P9187) and colour development stopped by addition of 3M H₂SO₄. Absorbance was measured at 490 nm with a plate reader and the mean absorbance plotted.

[0841] The results are presented in FIG. 155 and show that BPC1616 binds to recombinant human IL-12 whereas the two control antibodies showed no binding.

### 30.4 IL-18 Binding ELISA

[0842] The cell supernatants from the transfections were assessed for binding to recombinant human IL-18. Briefly, ELISA plates were coated with human IL-18 (made at GSK) at 1 μg/ml and blocked with blocking solution (4% BSA in Tris buffered saline). Various dilutions of the cell supernatant were added as well as irrelevant antibodies (Pascolizumab and an isotype matched control human IgG), diluted in blocking solution. The plate was incubated for 1 hour at room temp before washing in TBS+0.05% Tween 20 (TBST). Binding was detected by the addition of a peroxidase labelled anti human kappa light chain antibody (Sigma A7164) at a dilution of 1/1000 in blocking solution. The plate was incubated for 1 hour at room temp before washing in TBST. The plate was developed by addition of OPD substrate (Sigma P9187) and colour development stopped by addition of 3M H₂SO₄. Absorbance was measured at 490 nm with a plate reader and the mean absorbance plotted. The results are presented in FIG. 156 and show that BPC1616 binds to recombinant human IL-18 whereas the two control antibodies show no binding.

### 30.5 IL-4 Binding ELISA

[0843] The cell supernatants from the transfections were assessed for binding to recombinant human IL-4. Briefly, ELISA plates were coated with human IL-4 (made at GSK) at 1 μg/ml and blocked with blocking solution (4% BSA in Tris buffered saline). Various dilutions of the cell supernatant were added as well as an anti IL-4 monoclonal antibody (Pascolizumab) and irrelevant antibody (Isotype matched control hIgG,), diluted in blocking solution. The plate was incubated for 1 hour at room temp before washing in TBS+0.05% Tween 20 (TBST). Binding was detected by the addition of a peroxidase labelled anti human kappa light chain antibody (Sigma A7164) at a dilution of 1/1000 in blocking solution. The plate was incubated for 1 hour at room temp before washing in TBST. The plate was developed by addition of OPD substrate (Sigma P9187) and colour development stopped by addition of 3M H₂SO₄. Absorbance was measured at 490 nm with a plate reader and the mean absorbance plotted.

[0844] The results are presented in FIG. 157 show that BPC1616 and Pascolizumab bind to recombinant human IL-4 whereas the control antibody shows no binding.

### Example 31

### Trispecific mAbdAbs Comprising Two Single Domains Antibodies Fused In-Line at the C-Terminus of a Monoclonal Antibody

### 31.1 Construction

[0845] Three trispecific antibodies (mAbdAb-dAb) were constructed where two single domain antibodies are fused in-line at the C-terminus of the heavy chain of a monoclonal antibody.

[0846] Briefly, a BglII restriction site at the N-terminus and BamHI restriction site at the C-terminus were introduced by PCR to flank the DNA sequences encoding the domain antibodies into the DOM10-53-474 (SEQ ID NO: 5), DOM9-155-154 (SEQ ID NO: 3) and DOM9-112-210 (SEQ ID NO: 4).

[0847] The DNA fragment encoding the DOM10-53-474 domain antibody was then cloned into a BamHI site of mammalian expression vector encoding the heavy chain of an anti IL-5 monoclonal antibody fused with an anti IL-4 domain antibody DOM9-112-210 (SEQ ID NO: 71). The DNA fragments encoding the DOM9-155-154 and DOM9-112-210 domain antibodies were both independently cloned into the BamHI site of a mammalian expression vector encoding the heavy chain of an anti-CD20 monoclonal antibody fused with an anti IL-13 domain antibody DOM10-53-474 (SEQ ID NO: 116). The resulting expression vectors encode a heavy chain with two single domain antibodies fused onto the C-terminus. The protein sequences of the heavy chains are given in SEQ ID NO: 195, 196 and 197 as set out in Table 39.

[0848] Table 39 is a summary of the mAbdAbs that have been constructed.

TABLE 39

| | | SEQ ID NO: of |
|---|---|---|
| | | amino acid |
| Antibody ID | Description | sequence |
| BPC1008 | Anti IL-5 Heavy Chain-G4S-dAb474- | 195 |
| | TVAAPSGS-dAb210 | |
| | Anti IL-5 Light Chain | 66 |
| BPC1009 | Anti CD-20 Heavy Chain-TVAAPSGS- | 196 |
| | dAb154-TVAAPSGS-dAb474 | |
| | Anti CD-20 Light Chain | 117 |
| BPC1010 | Anti CD-20 Heavy Chain-TVAAPSGS- | 197 |
| | dAb210-TVAAPSGS-dAb474 | |
| | Anti CD-20 Light Chain | 117 |

### 31.2 Expression and Purification

[0849] Expression plasmids encoding the heavy and light chains of BPC1008, BPC1009 and BPC1010 were co-transfected into HEK 2936E cells using 293fectin (Invitrogen, 12347019). A tryptone feed was added to the cell culture the following day and the supernatant material was harvested after about 2 to 6 days from initial transfection. The antibodies were purified using a Protein A column before being tested in binding assays.

### 31.3: IL-4 Binding ELISA

[0850] 96-well high binding plates were coated with 5 μg/ml human IL-4 (GSK) in Coating buffer (0.05M bicarbonate pH9.6, Sigma C-3041)₃ and stored overnight at 4° C. The plates were washed twice with Tris-Buffered Saline with 0.05% of Tween-20 (TBST). 100 μL of blocking solution (1% BSA in TBST buffer) was added in each well and the plates were incubated for at least one hour at room temperature. The purified antibodies were successively diluted across the plates in blocking solution. After one hour incubation, the plates were washed three times. Goat anti-human kappa light chain specific peroxidase conjugated antibody (Sigma A7164) was diluted 1 in 2000 in blocking solution and 50 μL was added to each well. The plates were incubated for one hour. The plates were washed three times, then OPD (o-phenylenediamine dihydrochloride) SigmaFast substrate solution was added to each well and the reaction was stopped 5 minutes later by addition of 25 μL of 3M sulphuric acid. Absorbance was read at 490 nm using the VersaMax Tunable Microplate Reader (Molecular Devices) using a basic endpoint protocol.

[0851] The results of the ELISA are shown in the FIG. 158 and confirm that antibodies BPC1008, 1009 and BPC1010 bind to recombinant human IL-4. The positive control Pascolizumab also showed binding to recombinant IL-4 whereas the negative control anti IL-13 mAb and Mepolizumab showed no binding to IL-4. Antibodies BPC1009 and BPC1010 were also tested in a separate experiment which gave similar result to those shown in FIG. 158.

### 31.4: IL-5 Binding ELISA

[0852] 96-well high binding plates were coated with 5.9 μg/ml human IL-5 (GSK) in coating buffer (0.05M bicarbonate pH9.6) and stored overnight at 4° C. The plates were washed twice with Tris-Buffered Saline with 0.05% of Tween-20 (TBST). 100 μL of blocking solution (1% BSA in TBST buffer) was added in each well and the plates were incubated for at least one hour at room temperature. The purified antibodies were successively diluted across the plates in blocking solution. After one hour incubation, the plates were washed three times. Goat anti-human kappa light chain specific peroxidase conjugated antibody (Sigma A7164) was diluted 1 in 2000 in blocking solution and 50 μL was added to each well. The plates were incubated for one hour. This was washed three times, then OPD (o-phenylenediamine dihydrochloride) SigmaFast substrate solution was added to each well and the reaction was stopped 5 minutes later by addition of 25 μL of 3M sulphuric acid. Absorbance was read at 490 nm using the VersaMax Tunable Microplate Reader (Molecular Devices) using a basic endpoint protocol.

[0853] FIG. 159 shows the results of the ELISA which confirms that antibodies BPC1008 bind to recombinant human IL-5 whereas BPC1009 and BPC1010 showed no binding to IL-5. The positive control Mepolizumab also showed binding to recombinant IL-5 whereas the negative control anti IL-13 mAb and Pascolizumab showed no binding to IL-5.

### IL-13 Binding ELISA

[0854] 96-well high binding plates were coated with 5 μg/ml human IL-13 (GSK) in Coating buffer (0.05M bicarbonate pH9.6, Sigma C-3041)₃ and stored overnight at 4° C. The plates were washed twice with Tris-Buffered Saline with 0.05% of Tween-20 (TBST). 100 μL of blocking solution (1% BSA in TBST buffer) was added in each well and the plates were incubated for at least one hour at room temperature. The purified antibodies were successively diluted across the plates in blocking solution. After one hour incubation, the plates were washed three times. Goat anti-human kappa light chain specific peroxidase conjugated antibody (Sigma A7164) was diluted 1 in 2000 in blocking solution and 50 μL was added to each well. The plates were incubated for one hour. This was washed three times, then OPD (o-phenylenediamine dihydrochloride) SigmaFast substrate solution was added to each well and the reaction was stopped 5 minutes later by addition of 25 μL of 3M sulphuric acid. Absorbance was read at 490 nm using the VersaMax Tunable Microplate Reader (Molecular Devices) using a basic endpoint protocol.

[0855] The results of the ELISA are shown in the FIG. 160 and confirm that antibodies BPC1008, 1009 and BPC1010 bind to recombinant human IL-13. The positive control anti IL-13 mAb also showed binding to recombinant IL-13 whereas the negative control Pascolizumab and Mepolizumab showed no binding to IL-13. Antibodies BPC1009 and BPC1010 were also tested in a separate experiment which gave similar result to those shown in FIG. 160.

### Example 32

### mAbdAbs with Single Domain Antibodies Fused onto Monovalent Scaffold

### 32.1 Construction of mAbdAbs

[0856] Bispecific antibodies comprising a fusion of a monovalent antibody (for further information see WO2006015371 and WO2007059782) and a domain antibody DOM-15-26-293 were constructed as follows. DNA sequences encoding the anti-c-Met Knob-into-hole heavy chain (SEQ ID NO: 202 and 203) was constructed using a PCR-based strategy followed by site directed mutagenesis. The DNA sequence encoding the anti-c-Met Unibody heavy chain (SEQ ID NO: 204) was constructed using a PCR-based strategy followed by removal of the hinge region by a PCR-based approach. Additionally, for fusion constructs, BamHI and EcoRI restriction sites were included at the C-terminus of the heavy chain expression cassette to facilitate the subsequent cloning of the anti VEGF-A domain antibody (DOM-15-26-593) DNA sequence (encoding amino acids 455-570 of SEQ ID NO: 75) as a BamHI-EcoRI fragment from an existing vector. The resulting expression vectors encode an anti-VEGFA domain antibody fused onto the C-terminus of the heavy chain via a GS linker (SEQ ID NO: 198, 199 and 201). The DNA sequence encoding the anti-c-Met light chain (SEQ ID NO: 200) was constructed by a PCR-based strategy.

[0857] The construction of BPC1604 is described in Example 14. Table 40 below is a summary of the monovalent scaffold mAbdAbs and antibodies that have been generated and expressed.

TABLE 40

| | | SED ID NO: of |
|---|---|---|
| Antibody | | amino acid |
| ID | Description | sequence |
| BPC1017 | anti cMET 5D5v2 Heavy Chain (hole)-GS- | 198 |
| | dAb593 | |
| | anti cMET 5D5v2 Heavy Chain (knob)-GS- | 199 |
| | dAb593 | |
| | anti cMET 5D5v2 Light Chain | 200 |
| BPC1018 | anti cMET 5D5v2 IgG4 Heavy Chain | 201 |
| | (UNIBODY)-GS-dAb593 | |
| | anti cMET 5D5v2 Light Chain | 200 |
| BPC1019 | anti cMET 5D5v2 Heavy Chain (hole) | 202 |
| | anti cMET 5D5v2 Heavy Chain (knob) | 203 |
| | anti cMET 5D5v2 Light Chain | 200 |
| BPC1020 | anti cMET 5D5v2 IgG4 Heavy Chain | 204 |
| | (UNIBODY) | |
| | anti cMET 5D5v2 Light Chain | 200 |

### 32.2 Expression and Purification

[0858] Expression plasmids encoding the heavy chain of BPC1017, BPC1018, BPC1019 and BPC1020 were co-transfected into HEK 2936E cells using 293fectin (Invitrogen, 12347019). A tryptone feed was added to the cell culture the following day and the supernatant material was harvested after about 2 to 6 days from initial transfection. The antibodies were purified using a Protein A column before being tested in binding assays.

### 32.3 HGF Receptor Binding ELISA

[0859] 96-well high binding plates were coated with 5 μg/ml Recombinant Human HGF R (c-MET)/Fc Chimera (R&D system, Catalog Number: 358-MT/CF) in Coating buffer (0.05M bicarbonate pH9.6, Sigma C-3041)₃ and stored overnight at 4° C. The plates were washed twice with Tris-Buffered Saline with 0.05% of Tween-20 (TBST). 100 μL of blocking solution (1% BSA in TBST buffer) was added in each well and the plates were incubated for at least 30 minutes at room temperature. The plates were washed three times. Then the purified antibodies were successively diluted across the plates in blocking solution. After one hour incubation at room temp, the plates were washed three times. Goat anti-human kappa light chain specific peroxidase conjugated antibody (Sigma A7164) was diluted in blocking solution to 1 in 2000 and was added to each well. The plates were incubated for one hour. This was washed three times and then OPD (o-phenylenediamine dihydrochloride) SigmaFast substrate solution was added to each well and the reaction was stopped 5 minutes later by the addition of 25 μL of 3M sulphuric acid. Absorbance was read at 490 nm using the VersaMax Tunable Microplate Reader (Molecular Devices) using a basic endpoint protocol.

[0860] The results of the ELISA are shown in the FIG. 161 and confirm that mAbdAbs BPC1017 and BPC1018 bind to recombinant human c-MET with comparable activity to the antibodies BPC1019 and BPC1020. The negative control Pascolizumab and BPC1604 (an IGF-1R/VEGF mAbdAb) showed no binding to c-MET.

### 32.4 VEGF Binding ELISA

[0861] 96-well high binding plates were coated with 0.4 μg/mL of human VEGF (GSK) in PBS and incubated at 4° C. overnight. The plates were washed twice with Tris-Buffered Saline with 0.05% of Tween-20 (TBST). 100 μL of blocking solution (4% BSA in TBST buffer) was added to each well and the plates were incubated for at least one hour at room temperature. Another wash step was then performed. The purified antibodies were successively diluted across the plates in blocking solution. After one hour incubation at room temp, the plates were washed. Goat anti-human kappa light chain specific peroxidase conjugated antibody was diluted in blocking solution to 1 in 2000 and was added to each well. The plates were incubated for one hour at room temp. After another wash step, OPD (o-phenylenediamine dihydrochloride) SigmaFast substrate solution was added to each well and the reaction was stopped 5 minutes later by the addition of 25 μL of 3M sulphuric acid. Absorbance was read at 490 nm using the VersaMax Tunable Microplate Reader (Molecular Devices) using a basic endpoint protocol.

[0862] FIG. 162 shows the results of the ELISA which confirms that mAbdAbs BPC1017 and BPC1018 bind to recombinant human VEGF. The positive control BPC1604 also showed binding to recombinant human VEGF whereas Pascolizumab, BPC1019 and BPC1020 showed no binding to VEGF.

### Example 33

### mAbdAbs Containing the Anti-IL13 dAbs DOM10-53-546 dAb and DOM10-53-567

### 33.1 Construction, Expression and Purification

[0863] The anti-IL4 mAb-anti-IL13dAbs shown in Table 41 were cloned and expressed transiently in HEK2936E cells, purified (as described in examples 1, 1.3 and 1.5 respectively).

TABLE 41

| | | Sequence ID |
|---|---|---|
| Name | Description | No. |
| PascoH-TVAAPS-546 | H chain = Pascolizumab | 157 (=H chain) |
| | heavy chain-TVAAPS- | 15 (=L chain) |
| | DOM10-53-546 dAb | |
| | L chain = Pascolizumab light | |
| | chain | |
| PascoH-TVAAPS-567 | H chain = Pascolizumab | 159 (=H chain) |
| | heavy chain-TVAAPS- | 15 (=L chain) |
| | DOM10-53-567 dAb | |
| | L chain = Pascolizumab light | |
| | chain | |

[0864] Purified PascoH-TVAAPS-546 and PascoH-TVAAPS-567 mAbdAbs were analysed by size exclusion chromatography (SEC) and sodium dodecyl sulphate poly acrylamide gel electrophoresis (SDS PAGE), under reducing conditions. The SEC and SDS PAGE data are shown in FIGS. 163, 164, 165 and 166.

### 33.2 Biacore Analysis of Binding to IL-13 and IL-4

[0865] Purified PascoH-TVAAPS-546 and PascoH-TVAAPS-567 were tested for binding to human IL-13 and human IL-4 using the BIAcore™ T100 at 25° C. (as described in methods 4 and 5). These data are shown in Table 42.

TABLE 42

| | Binding affinity, KD (nM) | | | | | |
|---|---|---|---|---|---|---|
| | Human IL-4 | | | Human IL-13 | | |
| Molecule | on rate | off rate | | on rate (ka, | off rate | KD |
| (purified material) | (ka, Ms⁻¹) | (kd, s⁻¹) | KD (nM) | Ms⁻¹) | (kd, s⁻¹) | (nM) |
| PascoH-TVAAPS- | 4.92E+6 | 2.37E−5 | 0.00482 | 2.26E+5 | 1.69E−4 | 0.747 |
| 546 | | | | | | |
| PascoH-TVAAPS- | — | — | Tight binding | 4.46E+5 | 1.70E−5 | 0.038 |
| 567 | | | observed | | | |
| Anti-human IL-13 | — | — | Does not bind | 1.00E+6 | 3.78E−4 | 0.377 |
| mAb | | | | | | |
| Pascolizumab | 4.25E+6 | 2.43E−5 | 0.00572 | — | — | Does |
| | | | | | | not bind |

[0866] The mAbdAbs tested in this assay both bound IL-4 with very high affinity (NB, for PascoH-TVAAPS-567 this was beyond the sensitivity of the machine) and with similar binding affinity to that of the anti-human IL4 mAb alone (Pascolizumab). PascoH-TVAAPS-546 and PascoH-TVAAPS-567 both bound IL-13. Note that the anti-IL-13 dAbs alone (DOM10-53-546 and DOM10-53-567) were not tested in this assay as the dAb cannot be captured onto the Protein A or anti-human IgG coated CM5 chip; instead, the anti-human IL13 mAb was used as a positive control to demonstrate IL-13 binding in this assay.

[0867] These mAbdAbs were also tested for binding to cynomolgus IL-13 using the BIAcore™ T100 at 25° C. (as described in method 23). These data are shown in Table 43. A mAbdAb capture level between 500 and 750 relative response units was achieved, six IL-13 concentration curves (256, 64, 16, 4, 1 and 0.25 nM) were assessed for both the mAbdAbs and the anti-IL13 mAb.

TABLE 43

| | Binding affinity for | | |
|---|---|---|---|
| Molecule | cynomolgus IL-13 (KD) | | |
| (purified material) | on rate (ka, Ms⁻¹) | off rate (kd, s⁻¹) | KD (nM) |
| PascoH-TVAAPS-546 | 1.67E+6 | 2.09E−2 | 12.5 |
| PascoH-TVAAPS-567 | 5.92E+5 | 5.22E−3 | 8.8 |
| Anti-IL13 mAb | 4.79E+5 | 8.22E−5 | 0.171 |

[0868] PascoH-TVAAPS-546 and PascoH-TVAAPS-567 both bound cynomolgus IL-13 with similar binding affinities. Note that the anti-IL-13 dAbs alone (DOM10-53-546 and DOM10-53-567) were not tested in this assay as the dAb cannot be captured onto the Protein A or anti-human IgG coated CM5 chip; instead, the anti-human IL13 mAb was used as a positive control to demonstrate IL-13 binding in this assay.

### 33.3 Neutralisation of Human IL-13 and Cynomolgus IL-13 in TF-1 Cell Bioassays

[0869] Purified PascoH-TVAAPS-546 and PascoH-TVAAPS-567 were tested for neutralisation of human IL-13 and cynomolgus IL-13 in TF-1 cell bioassays (as described in method 8 and method 20 respectively). FIGS. 167 and 168 show the neutralisation data for human IL-13 and cynomolgus IL-13 (in the TF-1 cell bioassays) respectively. DOM10-53-616 was included as a positive control for neutralisation of IL-13 in these bioassays. A dAb with specificity for an irrelevant antigen (negative control dAb) was also included as a negative control for neutralisation of IL-13. In addition, PascoH-616 and PascoH-TVAAPS-616 were also tested in these assays.

[0870] Both PascoH-TVAAPS-546 and PascoH-TVAAPS-567 fully neutralised the bioactivity of human and cynomolgus IL-13 in the TF-1 cell bioassays.

[0871] ND₅₀ values were calculated from the dataset. The ND₅₀ value is the concentration of mAbdAb or mAb or dAb, which is able to neutralise the bioactivity of IL-13 by 50%. The mean ND₅₀ value, the standard deviation (SD) and the number of times tested (n) are shown in table 44.

TABLE 44

| Mean ND₅₀ value & standard | |
|---|---|
| deviation (nM) | |
| human IL-13 | cyno IL-13 |

| Molecule | mean (SD) | n | mean (SD) | n |
|---|---|---|---|---|
| PascoH-TVAAPS-546 | 1.522 | 1 | 33.88 | 1 |
| PascoH-TVAAPS-567 | 2.06 | 1 | 38.25 | 1 |
| DOM10-53-616 | 0.536 | 1 | 3.57 | 1 |

| | | |
|---|---|---|
| Negative control dAb | did not | did not |
| | neutralise | neutralise |

### Example 34

### mAbdAbs with IgG2, IgG4 and IgG4PE Heavy Chain Constant Regions

### 34.1 Construction of mAbdAbs

[0872] The heavy chain constant regions of human antibody isotypes IgG2, IgG4 and a variant IgG4 (IgG4PE) genes were amplified from existing constructs by PCR and cloned using standard molecular biology techniques into an expression vector encoding the PascoH-GS-474 heavy chain (SEQ ID NO: 48). The mAbdAbs antibodies designed and tested are listed in Table 45.

TABLE 45

| | | SED ID NO: of amino acid |
|---|---|---|
| Antibody ID | Description | sequence |
| BPC1617 | PascoH IgG2-GS-474 | 207 |
| | Pasco Kappa | 15 |
| BPC1618 | PascoH IgG4-GS-474 | 208 |
| | Pasco Kappa | 15 |
| BPC1619 | PascoH IgG4PE-GS-474 | 209 |
| | Pasco Kappa | 15 |

### 34.2 Expression

[0873] The mAbdAbs set out in table 45 were expressed, along with PascoH-GS-474 (SEQ ID NO: 48 and 15) which is designated BPC1000. Briefly, 750 μl of HEK293 cells at 1.5×10⁶ cells/ml were co-transfected with heavy and light chain expression plasmids previously incubated with 293fectin reagent (Invitrogen #51-0031). These were placed in a shaking incubator at 37° C., 5% CO₂, and 95% RH. After 1 hour, Tryptone feeding media was added and the cells grown for a further 72 hours. Supernatant was harvested by centrifugation.

### 34.3 IL-4 Binding ELISA

[0874] The supernatants containing these mAbdAbs were assessed for binding to recombinant human IL-4. Briefly, ELISA plates were coated with human IL-4 (made at GSK) at 1 μg/ml and blocked with blocking solution (4% BSA in Tris buffered saline). Various dilutions of the cell supernatant, an anti IL-4 monoclonal antibody (Pascolizumab) and an antibody of irrelevant specificity (586 anti IL-13) were added. All samples were diluted in blocking solution. The plate was incubated for 1 hour at room temp before washing in TBS+0.05% Tween 20 (TBST). Binding was detected by the addition of a peroxidase labelled anti human kappa light chain antibody (Sigma A7164) at a dilution of 1/1000 in blocking solution. The plate was incubated for 1 hour at room temp before washing in TBST. The plate was developed by addition of OPD substrate (Sigma P9187) and colour development stopped by addition of 3M H₂SO₄. Absorbance was measured at 490 nm with a plate reader and the mean absorbance plotted.

[0875] The results presented in FIG. 169 show that the mAbdAbs containing the alternative isotypes all bind to human IL-4. For the mAbdAbs BPC1000, BPC1617, BPC1618 and BPC1619, the amount of antibody in the supernatant was not quantified thus the data presented in FIG. 169 is represented as a dilution factor of the neat supernatant material. For the anti-IL4 and IL-13 control antibodies, purified material was used in the assay and the starting concentration of 1 μg/ml and 1 μg/ml was used respectively (which is equivalent to dilution factor of 1 in FIG. 169).

### 34.4 IL-13 Binding ELISA

[0876] The supernatants containing these mAbdAbs were assessed for binding to recombinant human IL-13. Briefly, ELISA plates were coated with human IL-13 (made at GSK) at 5 μg/ml and blocked with blocking solution (4% BSA in Tris buffered saline). Various dilutions of the cell supernatant, an anti IL-13 monoclonal antibody (586) and an antibody of irrelevant specificity (Pascolizumab anti IL-4) were added. All samples were diluted in blocking solution. The plate was incubated for 1 hour at room temp before washing in TBS 0.05% Tween 20 (TBST). Binding was detected by the addition of a peroxidase labelled anti human kappa light chain antibody (Sigma A7164) at a dilution of 1/1000 in blocking solution. The plate was incubated for 1 hour at room temp before washing in TBST. The plate was developed by addition of OPD substrate (Sigma P9187) and colour development stopped by addition of 3M H₂SO₄. Absorbance was measured at 490 nm with a plate reader and the mean absorbance plotted.

[0877] The results presented in FIG. 170 show that the bispecific antibodies containing the alternative isotypes all bind to human IL-13. For the bispecific antibodies BPC1000, BPC1617, BPC1618 and BPC1619, the amount of antibody in the supernatant was not quantified thus the data presented in FIG. 170 is represented as a dilution factor of the neat supernatant material. For the anti-IL4 and IL-13 control antibodies, purified material was used in the assay at a starting concentration of 1 μg/ml and 1 μg/ml respectively (which is equivalent to dilution factor of 1 in FIG. 170).

### Example 35

### Alternative anti-IL-13/IL-4 mAbdAbs

### 35.1 Construction of Anti-IL-13/IL-4 mAbdAbs with Alternative Variable Region Sequences

[0878] Using standard molecular biology techniques, DNA sequences encoding alternative heavy chain variable region anti-IL-13 mAb designated ‘C1’ and ‘D1’ were transferred from existing constructs to an expression vector containing DNA encoding the hIgG1 constant region fused to an anti IL-4 domain antibody (DOM9-112-210) via a TVAAPSGS linker at the c-terminus of the constant region. DNA sequences encoding alternative light chain variable region of IL-13 mAbs designated ‘M0’ and ‘N0’ were assembled de novo and cloned into expression vectors containing the human Ck constant region. These alternative heavy and light chain antibody variable regions comprise the same CDR regions as the anti-IL-13 antibody described in SEQ ID NO: 12 and 13 but with an alternative humanised variable framework region.

### 35.2 Construction of mAbdAbs using the Variable Regions of the Anti IL-13 mAb ‘656’

[0879] Using standard molecular biology techniques, a DNA sequence encoding the heavy chain variable region of the humanised anti IL-13 mAb ‘656’, were transferred from an existing construct and cloned into an expression vector containing DNA encoding the hIgG1 constant region fused to an anti IL-4 domain antibody (DOM9-112-210) via a TVAAPS linker at the c-terminus of the constant region. A DNA sequence encoding the variable light region was transferred from an existing construct and cloned into an expression vector containing the human Ck constant region.

### 35.3 Expression of mAbdAbs

[0880] Briefly, 25 ml of HEK293 cells at 1.5×10⁶ cells/ml were co-transfected with heavy and light chain expression plasmids previously incubated with 293fectin reagent (Invitrogen #51-0031). These were placed in a shaking incubator at 37° C., 5% CO₂, and 95% RH. After 24 hours Tryptone feeding media was added and the cells grown for a further 72 hours. Supernatant was harvested by centrifugation and IgG levels quantified by ELISA. The antibodies constructed and expressed are listed in Table 46.

TABLE 46

| | | SED ID NO: of |
|---|---|---|
| Antibody ID/ | | amino acid |
| Name | Description | sequence |
| BPC1607 | H chain = C1-TVAAPSGS-210 | 151 |
| | L chain = M0 Kappa | 154 |
| BPC1608 | H chain = C1-TVAAPSGS-210 | 151 |
| | L chain = N0 Kappa | 153 |
| BPC1609 | H chain = C1-TVAAPSGS-210 | 151 |
| | L chain = 586 Kappa | 13 |
| | (Anti-human IL-13 mAb light chain) | |
| BPC1610 | H chain = D1-TVAAPSGS-210 | 152 |
| | L chain = M0 Kappa | 154 |
| BPC1611 | H chain = D1-TVAAPSGS-210 | 152 |
| | L chain = N0 Kappa | 153 |
| BPC1612 | H chain = D1-TVAAPSGS-210 | 152 |
| | L chain = 586 Kappa | 13 |
| | (Anti-human IL-13 mAb light chain) | |
| BPC1613 | H chain = 586H-TVAAPS-210 | 88 |
| | (Anti-human IL-13 mAb heavy | |
| | chain-TVAAPS-DOM9-112-210 | |
| | dAb) | |
| | L chain = M0 Kappa | 154 |
| BPC1614 | H chain = 586H-TVAAPS-210 | 88 |
| | (Anti-human IL-13 mAb heavy | |
| | chain-TVAAPS-DOM9-112-210 | |
| | dAb) | |
| | L chain = N0 Kappa | 153 |
| BPC1615 | H chain = 656H-TVAAPS-210 | 155 |
| | (Anti-human IL-13 mAb 2 heavy | |
| | chain-TVAAPS-DOM9-112-210 | |
| | dAb) | |
| | L chain = 656 Kappa | 156 |
| | (Anti-human IL-13 mAb 2 light chain) | |
| BPC1602 | H chain = 586H-TVAAPS-210 | 88 |
| (586H- | (Anti-human IL-13 mAb heavy | |
| | chain-TVAAPS-DOM9-112-210 | |
| TVAAPS-210 | dAb) | |
| GS removed) | L chain = 586 Kappa | 13 |
| | (Anti-human IL-13 mAb light chain) | |

### 35.4 Binding of the mAbdAbs to IL-13

[0881] The binding activity of the mAbdAbs to IL-13 was assessed by ELISA. In brief, 5 μg/ml recombinant E. coli-expressed human IL-13 (made and purified at GSK) was coated to a 96-well ELISA plate. The wells were blocked for 2 hours at room temperature, mAbdAb constructs were then titrated out down the plate. Binding was detected using a 1 in 1000 dilution of anti-human kappa light chain peroxidase conjugated antibody (catalogue number A7164, Sigma-Aldrich).

[0882] FIG. 177 shows that all of the tested molecules were able to bind to human IL-13. Although BPC1615 showed binding in this ELISA it was not possible to accurately quantify the concentration of this molecule and therefore the IL-13 binding ELISA data for this molecule is not plotted in FIG. 177. BPC1615 has also been shown to have high affinity binding to IL-13 in an independent Biacore assay (Table 47).

### 35.5 Binding of Anti-IL13 mAb-Anti-IL4dAbs to IL-13 by BIAcore™

[0883] Cell supernatants from the HEK cell transfections were also tested for binding to recombinant E. Coli-expressed human IL-13 using BIAcore™ at 25° C. (as described in method 4). BPC1601 was tested as a purified protein. Binding affinities, presented in Table 47 confirm that all antibodies show high affinity binding to human IL-13.

TABLE 47

| | ka | kd | KD (nM) |
|---|---|---|---|
| C1-TVAAPSGS-210 & M0Kappa | 5.15E+5 | 8.89E−4 | 1.73 |
| BPC1607 | | | |
| C1-TVAAPSGS-210 & N0Kappa | 4.90E+5 | 8.83E−4 | 1.80 |
| BPC1608 | | | |
| C1-TVAAPSGS-210 & 586kappa | 7.55E+5 | 7.61E−4 | 1.01 |
| BPC1609 | | | |
| D1-TVAAPSGS-210 & M0kappa | 3.31E+5 | 4.66E−4 | 1.41 |
| BPC1610 | | | |
| D1-TVAAPSGS-210 & N0kappa | 2.59E+5 | 3.31E−4 | 1.28 |
| BPC1611 | | | |
| D1-TVAAPSGS-210 & 586kappa | 4.85E+5 | 2.74E−4 | 0.565 |
| BPC1612 | | | |
| 586H TVAAPS-210 & M0kappa | 5.54E+5 | 4.45E−4 | 0.804 |
| BPC1613 | | | |
| 586H TVAAPS-210 & N0kappa | 5.49E+5 | 4.42E−4 | 0.805 |
| BPC1614 | | | |
| 656H TVAAPS-210 & 656kappa | 4.89E+6 | 4.17E−4 | 0.085 |
| BPC1615 | | | |
| 586H-TVAAPS-210noGS BPC1602 | 8.21E+5 | 4.62E−4 | 0.562 |
| 586H-nolinker-210noGS BPC1601 | 8.93E+5 | 3.93E−4 | 0.440 |
| purified | | | |

### Example 36

### Generation of mAbdAb with Specificity for Human IL-5 and Human IL-13

### 36.1 Construction and Expression of mAbdAb

[0884] A mAbdAb molecule having the heavy chain set out in SEQ ID NO: 65 and the light chain set out in SEQ ID NO: 72 was expressed in HEK2936E cells. This was designated MepolizumabL-G4S-474 or BPC1021.

### 36.2 Binding of Anti-IL5 mAb-Anti-IL13dAb to IL-5 and IL-13

[0885] This mAbdAb (in cell supernatants) was tested for binding to human IL-13 in a direct binding ELISA (as described in method 1). These data are shown in FIG. 173. The sample was transfected and tested in duplicate and this has been annotated as sample A and sample B.

[0886] This mAbdAb bound IL-13. Purified anti-human IL13 mAb alone was included in this assay as a positive control for IL-13 binding. Purified anti-human IL-4 mAb (Pascolizumab) and anti-human IL-5 mAb (Mepolizumab) were included as negative controls for IL-13 binding. This mAbdAb was also tested for binding to human IL-5 in a direct binding ELISA (as described in Example 31.4) These data are illustrated in FIG. 174.

[0887] MepolizumabL-G4S-474 bound IL-5. Purified anti-human IL4 mAb (Pascolizumab) and purified anti human 13 mAb were included as negative controls for binding to IL-5. Purified anti-human IL5 mAb (Mepolizumab) was used as a positive control to demonstrate IL-5 binding in this assay.

1. An antigen-binding construct comprising a protein scaffold which is linked to one or more epitope-binding domains wherein the antigen-binding construct has at least two antigen binding sites at least one of which is from an epitope binding domain and at least one of which is from a paired VH/VL domain.

2. An antigen-binding construct comprising at least one homodimer comprising two or more structures of formula I: [chemical structure]
wherein
X represents a constant antibody region comprising constant heavy domain 2 and constant heavy domain 3;
R¹, R⁴, R⁷ and R³ represent a domain independently selected from an epitope-binding domain;
R² represents a domain selected from the group consisting of constant heavy chain 1, and an epitope-binding domain;
R³ represents a domain selected from the group consisting of a paired VH and an epitope-binding domain;
R⁵ represents a domain selected from the group consisting of constant light chain, and an epitope-binding domain;
R⁶ represents a domain selected from the group consisting of a paired VL and an epitope-binding domain;
n represents an integer independently selected from: 0, 1, 2, 3 and 4;
m represents an integer independently selected from: 0 and 1,
wherein the Constant Heavy chain 1 and the Constant Light chain domains are associated;
wherein at least one epitope binding domain is present;
and when R³ represents a paired VH domain, R⁶ represents a paired VL domain, so that the two domains are together capable of binding antigen.

3. An antigen-binding construct according to claim 2 wherein and R⁶ represents a paired VL and R³ represents a paired VH.

4. An antigen-binding construct according to claim 3 wherein either one or both of R⁷ and R³ represent an epitope binding domain.

5. An antigen-binding construct according to claim 2 wherein either one or both of R¹ and R⁴ represent an epitope binding domain.

6. An antigen-binding construct according to claim 2 wherein R⁴ is present.

7. An antigen-binding construct according to claim 2 wherein R¹ R⁷ and R³ represent an epitope binding domain.

8. An antigen-binding construct according to claim 2 wherein R¹ R⁷ and R⁸, and R⁴ represent an epitope binding domain.

9. An antigen-binding construct according to claim 1 wherein at least one epitope binding domain is a dAb.

10. An antigen-binding construct according to claim 9 wherein the dAb is a human dAb.

11. An antigen-binding construct according to claim 9 wherein the dAb is a camelid dAb.

12. An antigen-binding construct according to claim 9 wherein the dAb is a shark dAb (NARV).

13. An antigen-binding construct according to claim 1 wherein at least one epitope binding domain is derived from a scaffold selected from CTLA-4 (Evibody);
lipocalin; Protein A derived molecules such as Z-domain of Protein A (Affibody, SpA), A-domain (Avimer/Maxibody); Heat shock proteins such as GroEI and GroES; transferrin (trans-body); ankyrin repeat protein (DARPin); peptide aptamer; C-type lectin domain (Tetranectin); human γ-crystallin and human ubiquitin (affilins); PDZ domains; scorpion toxinkunitz type domains of human protease inhibitors; and fibronectin (adnectin).

14. An antigen-binding construct according to claim 13 wherein the epitope binding domain is derived from a scaffold selected from an Affibody, an ankyrin repeat protein (DARPin) and an adnectin.

15. An antigen-binding construct according to claim 1 wherein the epitope binding domain is selected from a dAb, an Affibody, an ankyrin repeat protein (DARPin) and an adnectin.

16. An antigen-binding construct of claim 1 wherein the binding construct has specificity for more than one antigen.

17. An antigen-binding construct according to claim 1 wherein the first binding site has specificity for a first epitope on an antigen and the second binding site has specificity for a second epitope on the same antigen.

18. An antigen-binding construct according to claim 1 wherein the antigen-binding construct is capable of binding IL-13.

19. An antigen-binding construct according to claim 1 wherein the antigen-binding construct is capable of binding two or more antigens selected from IL-13, IL-5, and IL-4.

20. An antigen-binding construct according claim 19 wherein the antigen-binding construct is capable of binding IL-13 and IL-4 simultaneously.

21. An antigen-binding construct according to claim 1 wherein the antigen-binding construct is capable of binding two or more antigens selected from VEGF, IGF-1R and EGFR,

22. An antigen-binding construct according to claim 1 wherein the antigen-binding construct is capable of binding TNF.

23. An antigen-binding construct according to claim 22 wherein the antigen-binding construct is capable of binding to TNF and ILL-R.

24. An antigen-binding construct according to claim 1 wherein the protein scaffold is an Ig scaffold.

25. An antigen-binding construct according to claim 24 wherein the Ig scaffold is an IgG scaffold.

26. An antigen-binding construct according to claim 25 wherein the IgG scaffold is selected from IgG1, IgG2, IgG3 and IgG4.

27. An antigen-binding construct according to claim 1 wherein the protein scaffold comprises a monovalent antibody.

28. An antigen-binding construct according to claim 1 wherein the IgG scaffold comprises all the domains of an antibody.

29. An antigen-binding construct according to claim 1 which comprises four domain antibodies.

30. An antigen-binding construct according to claim 29 wherein two of the domain antibodies have specificity for the same antigen.

31. An antigen-binding construct according to claim 29 wherein all of the domain antibodies have specificity for the same antigen.

32. An antigen-binding construct according to claim 1 wherein at least one of the single variable domains is directly attached to the Ig scaffold with a linker comprising from 1 to 150 amino acids.

33. An antigen-binding construct according to claim 32 wherein at least one of the single variable domains is directly attached to the Ig scaffold with a linker comprising from 1 to 20 amino acids.

34. An antigen-binding construct according to claim 33 wherein at least one of the epitope binding domains is directly attached to the Ig scaffold with a linker selected from any one of those set out in SEQ ID NO: 6 to 11 or ‘GS’, or any combination thereof.

35. An antigen-binding construct according to claim 1 wherein at least one of the epitope binding domains binds human serum albumin.

36. An antigen-binding construct according to claim 21 comprising an epitope binding domain attached to the Ig scaffold at the N-terminus of the light chain.

37. An antigen-binding construct according to claim 21 comprising an epitope binding domain attached to the Ig scaffold at the N-terminus of the heavy chain.

38. An antigen-binding construct according to claim 21 comprising an epitope binding domain attached to the Ig scaffold at the C-terminus of the light chain.

39. An antigen-binding construct according to claim 21 comprising an epitope binding domain attached to the Ig scaffold at the C-terminus of the heavy chain.

40. An antigen-binding construct according to claim 1 which has 4 antigen binding sites and which is capable of binding 4 antigens simultaneously.

41. An antigen-binding construct according to claim 1 for use in medicine.

42. An antigen-binding construct according to claim 1 for use in the manufacture of a medicament for treating cancer or inflammatory diseases such as asthma, rheumatoid arthritis or osteoarthritis.

43. A method of treating a patient suffering from cancer or an inflammatory disease such as asthma, rheumatoid arthritis or osteoarthritis, comprising administering a therapeutic amount of an antigen-binding construct according to claim 1.

44. An antigen-binding construct according to claim 1 for the treatment of cancer or inflammatory diseases such as asthma, rheumatoid arthritis or osteoarthritis.

45. A polynucleotide sequence encoding a heavy chain of an antigen binding construct according to claim 1.

46. A polynucleotide encoding a light chain of an antigen binding construct according to claim 1.

47. A recombinant transformed or transfected host cell comprising one or more polynucleotide sequences encoding a heavy chain and a light chain of an antigen binding construct of claim 1.

48. A method for the production of an antigen binding construct according to claim 1 which method comprises the step of culturing a host cell of claim 47 and isolating the antigen binding construct.

49. A pharmaceutical composition comprising an antigen binding construct of claim 1 and a pharmaceutically acceptable carrier.

The application's sequence listing, which the Patent Office published only in electronic form, follows.

SEQUENCE LISTING (270 sequences)

SEQ ID NO: 1 - protein, 108 aa, Homo Sapiens
DIQMTQSPSSLSASVGDRVTITCRASRPISDWLHWYQQKPGKAPKLLIAWASTLDSGVPSRFSGSGSGTDFTLTISSLQPEDFATYYCLQEGWGPPTFGQGTKVEIKR

SEQ ID NO: 2 - protein, 108 aa, Homo Sapiens
DIQMTQSPSSLSASVGDRVTITCRASRPISDWLHWYQQKPGKAPKLLIAWASSLYEGVPSRFSGSGSGTDFTLTISSLQPEDFATYYCLQEGWGPPTFGQGTKVEIKR

SEQ ID NO: 3 - protein, 108 aa, Homo Sapiens
DIQMTQSPSSLSASVGDRVTITCRASRPISDWLHWYQQKPGKAPKLLIAWASSLQGGVPSRFSGSGSGTDFTLTISSLQPEDFATYYCLQEGWGPPTFGQGTKVEIKR

SEQ ID NO: 4 - protein, 116 aa, Homo Sapiens
EVQLLESGGGLVQPGGSLRLSCAASGFTFRNFGMGWVRQAPGKGLEWVSWIISSGTETYYADSVKGRFTISRDNSKNTLYLQMNSLRAEDTAVYYCAKSLGRFDYWGQGTLVTVSS

SEQ ID NO: 5 - protein, 118 aa, Homo Sapiens
GVQLLESGGGLVQPGGSLRLSCAASGFTFAWYDMGWVRQAPGKGLEWVSSIDWHGEVTYYADSVKGRFTISRDNSKNTLYLQMNSLRAEDTAVYYCATAEDEPGYDYWGQGTLVTVSS

SEQ ID NO: 6 - protein, 5 aa, Artificial Sequence
  Linker
GGGGS

SEQ ID NO: 7 - protein, 6 aa, Artificial Sequence
  Linker
TVAAPS

SEQ ID NO: 8 - protein, 7 aa, Artificial Sequence
  Linker
ASTKGPT

SEQ ID NO: 9 - protein, 7 aa, Artificial Sequence
  Linker
ASTKGPS

SEQ ID NO: 10 - protein, 15 aa, Artificial Sequence
  Linker
EPKSCDKTHTCPPCP

SEQ ID NO: 11 - protein, 18 aa, Artificial Sequence
  Linker
ELQLEESCAEAQDGELDG

SEQ ID NO: 12 - protein, 455 aa, Artificial Sequence
  Humanised
QVQLVQSGAEVKKPGSSVKVSCKASGFYIKDTYMHWVRQAPGQGLEWMGTIDPANGNTKYVPKFQGRVTITADESTSTAYMELSSLRSEDTAVYYCARSIYDDYHYDDYYAMDYWGQGTLVTVSSASTKGPSVFPLAPSSKSTSGGTAALGCLVKDYFPEPVTVSWNSGALTSGVHTFPAVLQSSGLYSLSSVVTVPSSSLGTQTYICNVNHKPSNTKVDKKVEPKSCDKTHTCPPCPAPELLGGPSVFLFPPKPKDTLMISRTPEVTCVVVDVSHEDPEVKFNWYVDGVEVHNAKTKPREEQYNSTYRVVSVLTVLHQDWLNGKEYKCKVSNKALPAPIEKTISKAKGQPREPQVYTLPPSRDELTKNQVSLTCLVKGFYPSDIAVEWESNGQPENNYKTTPPVLDSDGSFFLYSKLTVDKSRWQQGNVFSCSVMHEALHNHYTQKSLSLSPGK

SEQ ID NO: 13 - protein, 219 aa, Artificial Sequence
  Humanised
DIVMTQSPLSLPVTPGEPASISCRSSQNIVHINGNTYLEWYLQKPGQSPRLLIYKISDRFSGVPDRFSGSGSGTDFTLKISRVEADDVGIYYCFQGSHVPWTFGQGTKLEIKRTVAAPSVFIFPPSDEQLKSGTASVVCLLNNFYPREAKVQWKVDNALQSGNSQESVTEQDSKDSTYSLSSTLTLSKADYEKHKVYACEVTHQGLSSPVTKSFNRGEC

SEQ ID NO: 14 - protein, 451 aa, Artificial Sequence
  Humanised
QVTLRESGPALVKPTQTLTLTCTFSGFSLSTSGMGVSWIRQPPGKGLEWLAHIYWDDDKRYNPSLKSRLTISKDTSRNQVVLTMTNMDPVDTATYYCARRETVFYWYFDVWGRGTLVTVSSASTKGPSVFPLAPSSKSTSGGTAALGCLVKDYFPEPVTVSWNSGALTSGVHTFPAVLQSSGLYSLSSVVTVPSSSLGTQTYICNVNHKPSNTKVDKKVEPKSCDKTHTCPPCPAPELLGGPSVFLFPPKPKDTLMISRTPEVTCVVVDVSHEDPEVKFNWYVDGVEVHNAKTKPREEQYNSTYRVVSVLTVLHQDWLNGKEYKCKVSNKALPAPIEKTISKAKGQPREPQVYTLPPSRDELTKNQVSLTCLVKGFYPSDIAVEWESNGQPENNYKTTPPVLDSDGSFFLYSKLTVDKSRWQQGNVFSCSVMHEALHNHYTQKSLSLSPGK

SEQ ID NO: 15 - protein, 218 aa, Artificial Sequence
  Humanised
DIVLTQSPSSLSASVGDRVTITCKASQSVDYDGDSYMNWYQQKPGKAPKLLIYAASNLESGIPSRFSGSGSGTDFTFTISSLQPEDIATYYCQQSNEDPPTFGQGTKVEIKRTVAAPSVFIFPPSDEQLKSGTASVVCLLNNFYPREAKVQWKVDNALQSGNSQESVTEQDSKDSTYSLSSTLTLSKADYEKHKVYACEVTHQGLSSPVTKSFNRGEC

SEQ ID NO: 16 - protein, 565 aa, Artificial Sequence
  Humanised
QVQLVQSGAEVKKPGSSVKVSCKASGFYIKDTYMHWVRQAPGQGLEWMGTIDPANGNTKYVPKFQGRVTITADESTSTAYMELSSLRSEDTAVYYCARSIYDDYHYDDYYAMDYWGQGTLVTVSSASTKGPSVFPLAPSSKSTSGGTAALGCLVKDYFPEPVTVSWNSGALTSGVHTFPAVLQSSGLYSLSSVVTVPSSSLGTQTYICNVNHKPSNTKVDKKVEPKSCDKTHTCPPCPAPELLGGPSVFLFPPKPKDTLMISRTPEVTCVVVDVSHEDPEVKFNWYVDGVEVHNAKTKPREEQYNSTYRVVSVLTVLHQDWLNGKEYKCKVSNKALPAPIEKTISKAKGQPREPQVYTLPPSRDELTKNQVSLTCLVKGFYPSDIAVEWESNGQPENNYKTTPPVLDSDGSFFLYSKLTVDKSRWQQGNVFSCSVMHEALHNHYTQKSLSLSPGKGSDIQMTQSPSSLSASVGDRVTITCRASRPISDWLHWYQQKPGKAPKLLIAWASTLDSGVPSRFSGSGSGTDFTLTISSLQPEDFATYYCLQEGWGPPTFGQGTKVEIKR

SEQ ID NO: 17 - protein, 565 aa, Artificial Sequence
  Humanised
QVQLVQSGAEVKKPGSSVKVSCKASGFYIKDTYMHWVRQAPGQGLEWMGTIDPANGNTKYVPKFQGRVTITADESTSTAYMELSSLRSEDTAVYYCARSIYDDYHYDDYYAMDYWGQGTLVTVSSASTKGPSVFPLAPSSKSTSGGTAALGCLVKDYFPEPVTVSWNSGALTSGVHTFPAVLQSSGLYSLSSVVTVPSSSLGTQTYICNVNHKPSNTKVDKKVEPKSCDKTHTCPPCPAPELLGGPSVFLFPPKPKDTLMISRTPEVTCVVVDVSHEDPEVKFNWYVDGVEVHNAKTKPREEQYNSTYRVVSVLTVLHQDWLNGKEYKCKVSNKALPAPIEKTISKAKGQPREPQVYTLPPSRDELTKNQVSLTCLVKGFYPSDIAVEWESNGQPENNYKTTPPVLDSDGSFFLYSKLTVDKSRWQQGNVFSCSVMHEALHNHYTQKSLSLSPGKGSDIQMTQSPSSLSASVGDRVTITCRASRPISDWLHWYQQKPGKAPKLLIAWASSLYEGVPSRFSGSGSGTDFTLTISSLQPEDFATYYCLQEGWGPPTFGQGTKVEIKR

SEQ ID NO: 18 - protein, 565 aa, Artificial Sequence
  Humanised
QVQLVQSGAEVKKPGSSVKVSCKASGFYIKDTYMHWVRQAPGQGLEWMGTIDPANGNTKYVPKFQGRVTITADESTSTAYMELSSLRSEDTAVYYCARSIYDDYHYDDYYAMDYWGQGTLVTVSSASTKGPSVFPLAPSSKSTSGGTAALGCLVKDYFPEPVTVSWNSGALTSGVHTFPAVLQSSGLYSLSSVVTVPSSSLGTQTYICNVNHKPSNTKVDKKVEPKSCDKTHTCPPCPAPELLGGPSVFLFPPKPKDTLMISRTPEVTCVVVDVSHEDPEVKFNWYVDGVEVHNAKTKPREEQYNSTYRVVSVLTVLHQDWLNGKEYKCKVSNKALPAPIEKTISKAKGQPREPQVYTLPPSRDELTKNQVSLTCLVKGFYPSDIAVEWESNGQPENNYKTTPPVLDSDGSFFLYSKLTVDKSRWQQGNVFSCSVMHEALHNHYTQKSLSLSPGKGSDIQMTQSPSSLSASVGDRVTITCRASRPISDWLHWYQQKPGKAPKLLIAWASSLQGGVPSRFSGSGSGTDFTLTISSLQPEDFATYYCLQEGWGPPTFGQGTKVEIKR

SEQ ID NO: 19 - protein, 573 aa, Artificial Sequence
  Humanised
QVQLVQSGAEVKKPGSSVKVSCKASGFYIKDTYMHWVRQAPGQGLEWMGTIDPANGNTKYVPKFQGRVTITADESTSTAYMELSSLRSEDTAVYYCARSIYDDYHYDDYYAMDYWGQGTLVTVSSASTKGPSVFPLAPSSKSTSGGTAALGCLVKDYFPEPVTVSWNSGALTSGVHTFPAVLQSSGLYSLSSVVTVPSSSLGTQTYICNVNHKPSNTKVDKKVEPKSCDKTHTCPPCPAPELLGGPSVFLFPPKPKDTLMISRTPEVTCVVVDVSHEDPEVKFNWYVDGVEVHNAKTKPREEQYNSTYRVVSVLTVLHQDWLNGKEYKCKVSNKALPAPIEKTISKAKGQPREPQVYTLPPSRDELTKNQVSLTCLVKGFYPSDIAVEWESNGQPENNYKTTPPVLDSDGSFFLYSKLTVDKSRWQQGNVFSCSVMHEALHNHYTQKSLSLSPGKGSEVQLLESGGGLVQPGGSLRLSCAASGFTFRNFGMGWVRQAPGKGLEWVSWIISSGTETYYADSVKGRFTISRDNSKNTLYLQMNSLRAEDTAVYYCAKSLGRFDYWGQGTLVTVSS

SEQ ID NO: 20 - protein, 568 aa, Artificial Sequence
  Humanised
QVQLVQSGAEVKKPGSSVKVSCKASGFYIKDTYMHWVRQAPGQGLEWMGTIDPANGNTKYVPKFQGRVTITADESTSTAYMELSSLRSEDTAVYYCARSIYDDYHYDDYYAMDYWGQGTLVTVSSASTKGPSVFPLAPSSKSTSGGTAALGCLVKDYFPEPVTVSWNSGALTSGVHTFPAVLQSSGLYSLSSVVTVPSSSLGTQTYICNVNHKPSNTKVDKKVEPKSCDKTHTCPPCPAPELLGGPSVFLFPPKPKDTLMISRTPEVTCVVVDVSHEDPEVKFNWYVDGVEVHNAKTKPREEQYNSTYRVVSVLTVLHQDWLNGKEYKCKVSNKALPAPIEKTISKAKGQPREPQVYTLPPSRDELTKNQVSLTCLVKGFYPSDIAVEWESNGQPENNYKTTPPVLDSDGSFFLYSKLTVDKSRWQQGNVFSCSVMHEALHNHYTQKSLSLSPGKGGGGSDIQMTQSPSSLSASVGDRVTITCRASRPISDWLHWYQQKPGKAPKLLIAWASTLDSGVPSRFSGSGSGTDFTLTISSLQPEDFATYYCLQEGWGPPTFGQGTKVEIKR

SEQ ID NO: 21 - protein, 568 aa, Artificial Sequence
  Humanised
QVQLVQSGAEVKKPGSSVKVSCKASGFYIKDTYMHWVRQAPGQGLEWMGTIDPANGNTKYVPKFQGRVTITADESTSTAYMELSSLRSEDTAVYYCARSIYDDYHYDDYYAMDYWGQGTLVTVSSASTKGPSVFPLAPSSKSTSGGTAALGCLVKDYFPEPVTVSWNSGALTSGVHTFPAVLQSSGLYSLSSVVTVPSSSLGTQTYICNVNHKPSNTKVDKKVEPKSCDKTHTCPPCPAPELLGGPSVFLFPPKPKDTLMISRTPEVTCVVVDVSHEDPEVKFNWYVDGVEVHNAKTKPREEQYNSTYRVVSVLTVLHQDWLNGKEYKCKVSNKALPAPIEKTISKAKGQPREPQVYTLPPSRDELTKNQVSLTCLVKGFYPSDIAVEWESNGQPENNYKTTPPVLDSDGSFFLYSKLTVDKSRWQQGNVFSCSVMHEALHNHYTQKSLSLSPGKGGGGSDIQMTQSPSSLSASVGDRVTITCRASRPISDWLHWYQQKPGKAPKLLIAWASSLYEGVPSRFSGSGSGTDFTLTISSLQPEDFATYYCLQEGWGPPTFGQGTKVEIKR

SEQ ID NO: 22 - protein, 568 aa, Artificial Sequence
  Humanised
QVQLVQSGAEVKKPGSSVKVSCKASGFYIKDTYMHWVRQAPGQGLEWMGTIDPANGNTKYVPKFQGRVTITADESTSTAYMELSSLRSEDTAVYYCARSIYDDYHYDDYYAMDYWGQGTLVTVSSASTKGPSVFPLAPSSKSTSGGTAALGCLVKDYFPEPVTVSWNSGALTSGVHTFPAVLQSSGLYSLSSVVTVPSSSLGTQTYICNVNHKPSNTKVDKKVEPKSCDKTHTCPPCPAPELLGGPSVFLFPPKPKDTLMISRTPEVTCVVVDVSHEDPEVKFNWYVDGVEVHNAKTKPREEQYNSTYRVVSVLTVLHQDWLNGKEYKCKVSNKALPAPIEKTISKAKGQPREPQVYTLPPSRDELTKNQVSLTCLVKGFYPSDIAVEWESNGQPENNYKTTPPVLDSDGSFFLYSKLTVDKSRWQQGNVFSCSVMHEALHNHYTQKSLSLSPGKGGGGSDIQMTQSPSSLSASVGDRVTITCRASRPISDWLHWYQQKPGKAPKLLIAWASSLQGGVPSRFSGSGSGTDFTLTISSLQPEDFATYYCLQEGWGPPTFGQGTKVEIKR

SEQ ID NO: 23 - protein, 576 aa, Artificial Sequence
  Humanised
QVQLVQSGAEVKKPGSSVKVSCKASGFYIKDTYMHWVRQAPGQGLEWMGTIDPANGNTKYVPKFQGRVTITADESTSTAYMELSSLRSEDTAVYYCARSIYDDYHYDDYYAMDYWGQGTLVTVSSASTKGPSVFPLAPSSKSTSGGTAALGCLVKDYFPEPVTVSWNSGALTSGVHTFPAVLQSSGLYSLSSVVTVPSSSLGTQTYICNVNHKPSNTKVDKKVEPKSCDKTHTCPPCPAPELLGGPSVFLFPPKPKDTLMISRTPEVTCVVVDVSHEDPEVKFNWYVDGVEVHNAKTKPREEQYNSTYRVVSVLTVLHQDWLNGKEYKCKVSNKALPAPIEKTISKAKGQPREPQVYTLPPSRDELTKNQVSLTCLVKGFYPSDIAVEWESNGQPENNYKTTPPVLDSDGSFFLYSKLTVDKSRWQQGNVFSCSVMHEALHNHYTQKSLSLSPGKGGGGSEVQLLESGGGLVQPGGSLRLSCAASGFTFRNFGMGWVRQAPGKGLEWVSWIISSGTETYYADSVKGRFTISRDNSKNTLYLQMNSLRAEDTAVYYCAKSLGRFDYWGQGTLVTVSS

SEQ ID NO: 24 - protein, 571 aa, Artificial Sequence
  Humanised
QVQLVQSGAEVKKPGSSVKVSCKASGFYIKDTYMHWVRQAPGQGLEWMGTIDPANGNTKYVPKFQGRVTITADESTSTAYMELSSLRSEDTAVYYCARSIYDDYHYDDYYAMDYWGQGTLVTVSSASTKGPSVFPLAPSSKSTSGGTAALGCLVKDYFPEPVTVSWNSGALTSGVHTFPAVLQSSGLYSLSSVVTVPSSSLGTQTYICNVNHKPSNTKVDKKVEPKSCDKTHTCPPCPAPELLGGPSVFLFPPKPKDTLMISRTPEVTCVVVDVSHEDPEVKFNWYVDGVEVHNAKTKPREEQYNSTYRVVSVLTVLHQDWLNGKEYKCKVSNKALPAPIEKTISKAKGQPREPQVYTLPPSRDELTKNQVSLTCLVKGFYPSDIAVEWESNGQPENNYKTTPPVLDSDGSFFLYSKLTVDKSRWQQGNVFSCSVMHEALHNHYTQKSLSLSPGKTVAAPSGSDIQMTQSPSSLSASVGDRVTITCRASRPISDWLHWYQQKPGKAPKLLIAWASTLDSGVPSRFSGSGSGTDFTLTISSLQPEDFATYYCLQEGWGPPTFGQGTKVEIKR

SEQ ID NO: 25 - protein, 571 aa, Artificial Sequence
  Humanised
QVQLVQSGAEVKKPGSSVKVSCKASGFYIKDTYMHWVRQAPGQGLEWMGTIDPANGNTKYVPKFQGRVTITADESTSTAYMELSSLRSEDTAVYYCARSIYDDYHYDDYYAMDYWGQGTLVTVSSASTKGPSVFPLAPSSKSTSGGTAALGCLVKDYFPEPVTVSWNSGALTSGVHTFPAVLQSSGLYSLSSVVTVPSSSLGTQTYICNVNHKPSNTKVDKKVEPKSCDKTHTCPPCPAPELLGGPSVFLFPPKPKDTLMISRTPEVTCVVVDVSHEDPEVKFNWYVDGVEVHNAKTKPREEQYNSTYRVVSVLTVLHQDWLNGKEYKCKVSNKALPAPIEKTISKAKGQPREPQVYTLPPSRDELTKNQVSLTCLVKGFYPSDIAVEWESNGQPENNYKTTPPVLDSDGSFFLYSKLTVDKSRWQQGNVFSCSVMHEALHNHYTQKSLSLSPGKTVAAPSGSDIQMTQSPSSLSASVGDRVTITCRASRPISDWLHWYQQKPGKAPKLLIAWASSLYEGVPSRFSGSGSGTDFTLTISSLQPEDFATYYCLQEGWGPPTFGQGTKVEIKR

SEQ ID NO: 26 - protein, 571 aa, Artificial Sequence
  Humanised
QVQLVQSGAEVKKPGSSVKVSCKASGFYIKDTYMHWVRQAPGQGLEWMGTIDPANGNTKYVPKFQGRVTITADESTSTAYMELSSLRSEDTAVYYCARSIYDDYHYDDYYAMDYWGQGTLVTVSSASTKGPSVFPLAPSSKSTSGGTAALGCLVKDYFPEPVTVSWNSGALTSGVHTFPAVLQSSGLYSLSSVVTVPSSSLGTQTYICNVNHKPSNTKVDKKVEPKSCDKTHTCPPCPAPELLGGPSVFLFPPKPKDTLMISRTPEVTCVVVDVSHEDPEVKFNWYVDGVEVHNAKTKPREEQYNSTYRVVSVLTVLHQDWLNGKEYKCKVSNKALPAPIEKTISKAKGQPREPQVYTLPPSRDELTKNQVSLTCLVKGFYPSDIAVEWESNGQPENNYKTTPPVLDSDGSFFLYSKLTVDKSRWQQGNVFSCSVMHEALHNHYTQKSLSLSPGKTVAAPSGSDIQMTQSPSSLSASVGDRVTITCRASRPISDWLHWYQQKPGKAPKLLIAWASSLQGGVPSRFSGSGSGTDFTLTISSLQPEDFATYYCLQEGWGPPTFGQGTKVEIKR

SEQ ID NO: 27 - protein, 579 aa, Artificial Sequence
  Humanised
QVQLVQSGAEVKKPGSSVKVSCKASGFYIKDTYMHWVRQAPGQGLEWMGTIDPANGNTKYVPKFQGRVTITADESTSTAYMELSSLRSEDTAVYYCARSIYDDYHYDDYYAMDYWGQGTLVTVSSASTKGPSVFPLAPSSKSTSGGTAALGCLVKDYFPEPVTVSWNSGALTSGVHTFPAVLQSSGLYSLSSVVTVPSSSLGTQTYICNVNHKPSNTKVDKKVEPKSCDKTHTCPPCPAPELLGGPSVFLFPPKPKDTLMISRTPEVTCVVVDVSHEDPEVKFNWYVDGVEVHNAKTKPREEQYNSTYRVVSVLTVLHQDWLNGKEYKCKVSNKALPAPIEKTISKAKGQPREPQVYTLPPSRDELTKNQVSLTCLVKGFYPSDIAVEWESNGQPENNYKTTPPVLDSDGSFFLYSKLTVDKSRWQQGNVFSCSVMHEALHNHYTQKSLSLSPGKTVAAPSGSEVQLLESGGGLVQPGGSLRLSCAASGFTFRNFGMGWVRQAPGKGLEWVSWIISSGTETYYADSVKGRFTISRDNSKNTLYLQMNSLRAEDTAVYYCAKSLGRFDYWGQGTLVTVSS

SEQ ID NO: 28 - protein, 574 aa, Artificial Sequence
  Humanised
QVQLVQSGAEVKKPGSSVKVSCKASGFYIKDTYMHWVRQAPGQGLEWMGTIDPANGNTKYVPKFQGRVTITADESTSTAYMELSSLRSEDTAVYYCARSIYDDYHYDDYYAMDYWGQGTLVTVSSASTKGPSVFPLAPSSKSTSGGTAALGCLVKDYFPEPVTVSWNSGALTSGVHTFPAVLQSSGLYSLSSVVTVPSSSLGTQTYICNVNHKPSNTKVDKKVEPKSCDKTHTCPPCPAPELLGGPSVFLFPPKPKDTLMISRTPEVTCVVVDVSHEDPEVKFNWYVDGVEVHNAKTKPREEQYNSTYRVVSVLTVLHQDWLNGKEYKCKVSNKALPAPIEKTISKAKGQPREPQVYTLPPSRDELTKNQVSLTCLVKGFYPSDIAVEWESNGQPENNYKTTPPVLDSDGSFFLYSKLTVDKSRWQQGNVFSCSVMHEALHNHYTQKSLSLSPGKGSASTKGPTGSDIQMTQSPSSLSASVGDRVTITCRASRPISDWLHWYQQKPGKAPKLLIAWASTLDSGVPSRFSGSGSGTDFTLTISSLQPEDFATYYCLQEGWGPPTFGQGTKVEIKR

SEQ ID NO: 29 - protein, 574 aa, Artificial Sequence
  Humanised
QVQLVQSGAEVKKPGSSVKVSCKASGFYIKDTYMHWVRQAPGQGLEWMGTIDPANGNTKYVPKFQGRVTITADESTSTAYMELSSLRSEDTAVYYCARSIYDDYHYDDYYAMDYWGQGTLVTVSSASTKGPSVFPLAPSSKSTSGGTAALGCLVKDYFPEPVTVSWNSGALTSGVHTFPAVLQSSGLYSLSSVVTVPSSSLGTQTYICNVNHKPSNTKVDKKVEPKSCDKTHTCPPCPAPELLGGPSVFLFPPKPKDTLMISRTPEVTCVVVDVSHEDPEVKFNWYVDGVEVHNAKTKPREEQYNSTYRVVSVLTVLHQDWLNGKEYKCKVSNKALPAPIEKTISKAKGQPREPQVYTLPPSRDELTKNQVSLTCLVKGFYPSDIAVEWESNGQPENNYKTTPPVLDSDGSFFLYSKLTVDKSRWQQGNVFSCSVMHEALHNHYTQKSLSLSPGKGSASTKGPTGSDIQMTQSPSSLSASVGDRVTITCRASRPISDWLHWYQQKPGKAPKLLIAWASSLYEGVPSRFSGSGSGTDFTLTISSLQPEDFATYYCLQEGWGPPTFGQGTKVEIKR

SEQ ID NO: 30 - protein, 574 aa, Artificial Sequence
  Humanised
QVQLVQSGAEVKKPGSSVKVSCKASGFYIKDTYMHWVRQAPGQGLEWMGTIDPANGNTKYVPKFQGRVTITADESTSTAYMELSSLRSEDTAVYYCARSIYDDYHYDDYYAMDYWGQGTLVTVSSASTKGPSVFPLAPSSKSTSGGTAALGCLVKDYFPEPVTVSWNSGALTSGVHTFPAVLQSSGLYSLSSVVTVPSSSLGTQTYICNVNHKPSNTKVDKKVEPKSCDKTHTCPPCPAPELLGGPSVFLFPPKPKDTLMISRTPEVTCVVVDVSHEDPEVKFNWYVDGVEVHNAKTKPREEQYNSTYRVVSVLTVLHQDWLNGKEYKCKVSNKALPAPIEKTISKAKGQPREPQVYTLPPSRDELTKNQVSLTCLVKGFYPSDIAVEWESNGQPENNYKTTPPVLDSDGSFFLYSKLTVDKSRWQQGNVFSCSVMHEALHNHYTQKSLSLSPGKGSASTKGPTGSDIQMTQSPSSLSASVGDRVTITCRASRPISDWLHWYQQKPGKAPKLLIAWASSLQGGVPSRFSGSGSGTDFTLTISSLQPEDFATYYCLQEGWGPPTFGQGTKVEIKR

SEQ ID NO: 31 - protein, 582 aa, Artificial Sequence
  Humanised
QVQLVQSGAEVKKPGSSVKVSCKASGFYIKDTYMHWVRQAPGQGLEWMGTIDPANGNTKYVPKFQGRVTITADESTSTAYMELSSLRSEDTAVYYCARSIYDDYHYDDYYAMDYWGQGTLVTVSSASTKGPSVFPLAPSSKSTSGGTAALGCLVKDYFPEPVTVSWNSGALTSGVHTFPAVLQSSGLYSLSSVVTVPSSSLGTQTYICNVNHKPSNTKVDKKVEPKSCDKTHTCPPCPAPELLGGPSVFLFPPKPKDTLMISRTPEVTCVVVDVSHEDPEVKFNWYVDGVEVHNAKTKPREEQYNSTYRVVSVLTVLHQDWLNGKEYKCKVSNKALPAPIEKTISKAKGQPREPQVYTLPPSRDELTKNQVSLTCLVKGFYPSDIAVEWESNGQPENNYKTTPPVLDSDGSFFLYSKLTVDKSRWQQGNVFSCSVMHEALHNHYTQKSLSLSPGKGSASTKGPTGSEVQLLESGGGLVQPGGSLRLSCAASGFTFRNFGMGWVRQAPGKGLEWVSWIISSGTETYYADSVKGRFTISRDNSKNTLYLQMNSLRAEDTAVYYCAKSLGRFDYWGQGTLVTVSS

SEQ ID NO: 32 - protein, 582 aa, Artificial Sequence
  Humanised
QVQLVQSGAEVKKPGSSVKVSCKASGFYIKDTYMHWVRQAPGQGLEWMGTIDPANGNTKYVPKFQGRVTITADESTSTAYMELSSLRSEDTAVYYCARSIYDDYHYDDYYAMDYWGQGTLVTVSSASTKGPSVFPLAPSSKSTSGGTAALGCLVKDYFPEPVTVSWNSGALTSGVHTFPAVLQSSGLYSLSSVVTVPSSSLGTQTYICNVNHKPSNTKVDKKVEPKSCDKTHTCPPCPAPELLGGPSVFLFPPKPKDTLMISRTPEVTCVVVDVSHEDPEVKFNWYVDGVEVHNAKTKPREEQYNSTYRVVSVLTVLHQDWLNGKEYKCKVSNKALPAPIEKTISKAKGQPREPQVYTLPPSRDELTKNQVSLTCLVKGFYPSDIAVEWESNGQPENNYKTTPPVLDSDGSFFLYSKLTVDKSRWQQGNVFSCSVMHEALHNHYTQKSLSLSPGKGSEPKSCDKTHTCPPCPGSDIQMTQSPSSLSASVGDRVTITCRASRPISDWLHWYQQKPGKAPKLLIAWASTLDSGVPSRFSGSGSGTDFTLTISSLQPEDFATYYCLQEGWGPPTFGQGTKVEIKR

SEQ ID NO: 33 - protein, 582 aa, Artificial Sequence
  Humanised
QVQLVQSGAEVKKPGSSVKVSCKASGFYIKDTYMHWVRQAPGQGLEWMGTIDPANGNTKYVPKFQGRVTITADESTSTAYMELSSLRSEDTAVYYCARSIYDDYHYDDYYAMDYWGQGTLVTVSSASTKGPSVFPLAPSSKSTSGGTAALGCLVKDYFPEPVTVSWNSGALTSGVHTFPAVLQSSGLYSLSSVVTVPSSSLGTQTYICNVNHKPSNTKVDKKVEPKSCDKTHTCPPCPAPELLGGPSVFLFPPKPKDTLMISRTPEVTCVVVDVSHEDPEVKFNWYVDGVEVHNAKTKPREEQYNSTYRVVSVLTVLHQDWLNGKEYKCKVSNKALPAPIEKTISKAKGQPREPQVYTLPPSRDELTKNQVSLTCLVKGFYPSDIAVEWESNGQPENNYKTTPPVLDSDGSFFLYSKLTVDKSRWQQGNVFSCSVMHEALHNHYTQKSLSLSPGKGSEPKSCDKTHTCPPCPGSDIQMTQSPSSLSASVGDRVTITCRASRPISDWLHWYQQKPGKAPKLLIAWASSLYEGVPSRFSGSGSGTDFTLTISSLQPEDFATYYCLQEGWGPPTFGQGTKVEIKR

SEQ ID NO: 34 - protein, 582 aa, Artificial Sequence
  Humanised
QVQLVQSGAEVKKPGSSVKVSCKASGFYIKDTYMHWVRQAPGQGLEWMGTIDPANGNTKYVPKFQGRVTITADESTSTAYMELSSLRSEDTAVYYCARSIYDDYHYDDYYAMDYWGQGTLVTVSSASTKGPSVFPLAPSSKSTSGGTAALGCLVKDYFPEPVTVSWNSGALTSGVHTFPAVLQSSGLYSLSSVVTVPSSSLGTQTYICNVNHKPSNTKVDKKVEPKSCDKTHTCPPCPAPELLGGPSVFLFPPKPKDTLMISRTPEVTCVVVDVSHEDPEVKFNWYVDGVEVHNAKTKPREEQYNSTYRVVSVLTVLHQDWLNGKEYKCKVSNKALPAPIEKTISKAKGQPREPQVYTLPPSRDELTKNQVSLTCLVKGFYPSDIAVEWESNGQPENNYKTTPPVLDSDGSFFLYSKLTVDKSRWQQGNVFSCSVMHEALHNHYTQKSLSLSPGKGSEPKSCDKTHTCPPCPGSDIQMTQSPSSLSASVGDRVTITCRASRPISDWLHWYQQKPGKAPKLLIAWASSLQGGVPSRFSGSGSGTDFTLTISSLQPEDFATYYCLQEGWGPPTFGQGTKVEIKR

SEQ ID NO: 35 - protein, 590 aa, Artificial Sequence
  Humanised
QVQLVQSGAEVKKPGSSVKVSCKASGFYIKDTYMHWVRQAPGQGLEWMGTIDPANGNTKYVPKFQGRVTITADESTSTAYMELSSLRSEDTAVYYCARSIYDDYHYDDYYAMDYWGQGTLVTVSSASTKGPSVFPLAPSSKSTSGGTAALGCLVKDYFPEPVTVSWNSGALTSGVHTFPAVLQSSGLYSLSSVVTVPSSSLGTQTYICNVNHKPSNTKVDKKVEPKSCDKTHTCPPCPAPELLGGPSVFLFPPKPKDTLMISRTPEVTCVVVDVSHEDPEVKFNWYVDGVEVHNAKTKPREEQYNSTYRVVSVLTVLHQDWLNGKEYKCKVSNKALPAPIEKTISKAKGQPREPQVYTLPPSRDELTKNQVSLTCLVKGFYPSDIAVEWESNGQPENNYKTTPPVLDSDGSFFLYSKLTVDKSRWQQGNVFSCSVMHEALHNHYTQKSLSLSPGKGSEPKSCDKTHTCPPCPGSEVQLLESGGGLVQPGGSLRLSCAASGFTFRNFGMGWVRQAPGKGLEWVSWIISSGTETYYADSVKGRFTISRDNSKNTLYLQMNSLRAEDTAVYYCAKSLGRFDYWGQGTLVTVSS

SEQ ID NO: 36 - protein, 585 aa, Artificial Sequence
  Humanised
QVQLVQSGAEVKKPGSSVKVSCKASGFYIKDTYMHWVRQAPGQGLEWMGTIDPANGNTKYVPKFQGRVTITADESTSTAYMELSSLRSEDTAVYYCARSIYDDYHYDDYYAMDYWGQGTLVTVSSASTKGPSVFPLAPSSKSTSGGTAALGCLVKDYFPEPVTVSWNSGALTSGVHTFPAVLQSSGLYSLSSVVTVPSSSLGTQTYICNVNHKPSNTKVDKKVEPKSCDKTHTCPPCPAPELLGGPSVFLFPPKPKDTLMISRTPEVTCVVVDVSHEDPEVKFNWYVDGVEVHNAKTKPREEQYNSTYRVVSVLTVLHQDWLNGKEYKCKVSNKALPAPIEKTISKAKGQPREPQVYTLPPSRDELTKNQVSLTCLVKGFYPSDIAVEWESNGQPENNYKTTPPVLDSDGSFFLYSKLTVDKSRWQQGNVFSCSVMHEALHNHYTQKSLSLSPGKGSELQLEESCAEAQDGELDGGSDIQMTQSPSSLSASVGDRVTITCRASRPISDWLHWYQQKPGKAPKLLIAWASTLDSGVPSRFSGSGSGTDFTLTISSLQPEDFATYYCLQEGWGPPTFGQGTKVEIKR

SEQ ID NO: 37 - protein, 585 aa, Artificial Sequence
  Humanised
QVQLVQSGAEVKKPGSSVKVSCKASGFYIKDTYMHWVRQAPGQGLEWMGTIDPANGNTKYVPKFQGRVTITADESTSTAYMELSSLRSEDTAVYYCARSIYDDYHYDDYYAMDYWGQGTLVTVSSASTKGPSVFPLAPSSKSTSGGTAALGCLVKDYFPEPVTVSWNSGALTSGVHTFPAVLQSSGLYSLSSVVTVPSSSLGTQTYICNVNHKPSNTKVDKKVEPKSCDKTHTCPPCPAPELLGGPSVFLFPPKPKDTLMISRTPEVTCVVVDVSHEDPEVKFNWYVDGVEVHNAKTKPREEQYNSTYRVVSVLTVLHQDWLNGKEYKCKVSNKALPAPIEKTISKAKGQPREPQVYTLPPSRDELTKNQVSLTCLVKGFYPSDIAVEWESNGQPENNYKTTPPVLDSDGSFFLYSKLTVDKSRWQQGNVFSCSVMHEALHNHYTQKSLSLSPGKGSELQLEESCAEAQDGELDGGSDIQMTQSPSSLSASVGDRVTITCRASRPISDWLHWYQQKPGKAPKLLIAWASSLYEGVPSRFSGSGSGTDFTLTISSLQPEDFATYYCLQEGWGPPTFGQGTKVEIKR

SEQ ID NO: 38 - protein, 585 aa, Artificial Sequence
  Humanised
QVQLVQSGAEVKKPGSSVKVSCKASGFYIKDTYMHWVRQAPGQGLEWMGTIDPANGNTKYVPKFQGRVTITADESTSTAYMELSSLRSEDTAVYYCARSIYDDYHYDDYYAMDYWGQGTLVTVSSASTKGPSVFPLAPSSKSTSGGTAALGCLVKDYFPEPVTVSWNSGALTSGVHTFPAVLQSSGLYSLSSVVTVPSSSLGTQTYICNVNHKPSNTKVDKKVEPKSCDKTHTCPPCPAPELLGGPSVFLFPPKPKDTLMISRTPEVTCVVVDVSHEDPEVKFNWYVDGVEVHNAKTKPREEQYNSTYRVVSVLTVLHQDWLNGKEYKCKVSNKALPAPIEKTISKAKGQPREPQVYTLPPSRDELTKNQVSLTCLVKGFYPSDIAVEWESNGQPENNYKTTPPVLDSDGSFFLYSKLTVDKSRWQQGNVFSCSVMHEALHNHYTQKSLSLSPGKGSELQLEESCAEAQDGELDGGSDIQMTQSPSSLSASVGDRVTITCRASRPISDWLHWYQQKPGKAPKLLIAWASSLQGGVPSRFSGSGSGTDFTLTISSLQPEDFATYYCLQEGWGPPTFGQGTKVEIKR

SEQ ID NO: 39 - protein, 593 aa, Artificial Sequence
  Humanised
QVQLVQSGAEVKKPGSSVKVSCKASGFYIKDTYMHWVRQAPGQGLEWMGTIDPANGNTKYVPKFQGRVTITADESTSTAYMELSSLRSEDTAVYYCARSIYDDYHYDDYYAMDYWGQGTLVTVSSASTKGPSVFPLAPSSKSTSGGTAALGCLVKDYFPEPVTVSWNSGALTSGVHTFPAVLQSSGLYSLSSVVTVPSSSLGTQTYICNVNHKPSNTKVDKKVEPKSCDKTHTCPPCPAPELLGGPSVFLFPPKPKDTLMISRTPEVTCVVVDVSHEDPEVKFNWYVDGVEVHNAKTKPREEQYNSTYRVVSVLTVLHQDWLNGKEYKCKVSNKALPAPIEKTISKAKGQPREPQVYTLPPSRDELTKNQVSLTCLVKGFYPSDIAVEWESNGQPENNYKTTPPVLDSDGSFFLYSKLTVDKSRWQQGNVFSCSVMHEALHNHYTQKSLSLSPGKGSELQLEESCAEAQDGELDGGSEVQLLESGGGLVQPGGSLRLSCAASGFTFRNFGMGWVRQAPGKGLEWVSWIISSGTETYYADSVKGRFTISRDNSKNTLYLQMNSLRAEDTAVYYCAKSLGRFDYWGQGTLVTVSS

SEQ ID NO: 40 - protein, 457 aa, Artificial Sequence
  Humanised
QVQLVQSGAEVKKPGSSVKVSCKASGFYIKDTYMHWVRQAPGQGLEWMGTIDPANGNTKYVPKFQGRVTITADESTSTAYMELSSLRSEDTAVYYCARSIYDDYHYDDYYAMDYWGQGTLVTVSSASTKGPSVFPLAPSSKSTSGGTAALGCLVKDYFPEPVTVSWNSGALTSGVHTFPAVLQSSGLYSLSSVVTVPSSSLGTQTYICNVNHKPSNTKVDKKVEPKSCDKTHTCPPCPAPELLGGPSVFLFPPKPKDTLMISRTPEVTCVVVDVSHEDPEVKFNWYVDGVEVHNAKTKPREEQYNSTYRVVSVLTVLHQDWLNGKEYKCKVSNKALPAPIEKTISKAKGQPREPQVYTLPPSRDELTKNQVSLTCLVKGFYPSDIAVEWESNGQPENNYKTTPPVLDSDGSFFLYSKLTVDKSRWQQGNVFSCSVMHEALHNHYTQKSLSLSPGKGS

SEQ ID NO: 41 - protein, 466 aa, Artificial Sequence
  Humanised
QVQLVQSGAEVKKPGSSVKVSCKASGFYIKDTYMHWVRQAPGQGLEWMGTIDPANGNTKYVPKFQGRVTITADESTSTAYMELSSLRSEDTAVYYCARSIYDDYHYDDYYAMDYWGQGTLVTVSSASTKGPSVFPLAPSSKSTSGGTAALGCLVKDYFPEPVTVSWNSGALTSGVHTFPAVLQSSGLYSLSSVVTVPSSSLGTQTYICNVNHKPSNTKVDKKVEPKSCDKTHTCPPCPAPELLGGPSVFLFPPKPKDTLMISRTPEVTCVVVDVSHEDPEVKFNWYVDGVEVHNAKTKPREEQYNSTYRVVSVLTVLHQDWLNGKEYKCKVSNKALPAPIEKTISKAKGQPREPQVYTLPPSRDELTKNQVSLTCLVKGFYPSDIAVEWESNGQPENNYKTTPPVLDSDGSFFLYSKLTVDKSRWQQGNVFSCSVMHEALHNHYTQKSLSLSPGKGSASTKGPTGS

SEQ ID NO: 42 - protein, 474 aa, Artificial Sequence
  Humanised
QVQLVQSGAEVKKPGSSVKVSCKASGFYIKDTYMHWVRQAPGQGLEWMGTIDPANGNTKYVPKFQGRVTITADESTSTAYMELSSLRSEDTAVYYCARSIYDDYHYDDYYAMDYWGQGTLVTVSSASTKGPSVFPLAPSSKSTSGGTAALGCLVKDYFPEPVTVSWNSGALTSGVHTFPAVLQSSGLYSLSSVVTVPSSSLGTQTYICNVNHKPSNTKVDKKVEPKSCDKTHTCPPCPAPELLGGPSVFLFPPKPKDTLMISRTPEVTCVVVDVSHEDPEVKFNWYVDGVEVHNAKTKPREEQYNSTYRVVSVLTVLHQDWLNGKEYKCKVSNKALPAPIEKTISKAKGQPREPQVYTLPPSRDELTKNQVSLTCLVKGFYPSDIAVEWESNGQPENNYKTTPPVLDSDGSFFLYSKLTVDKSRWQQGNVFSCSVMHEALHNHYTQKSLSLSPGKGSEPKSCDKTHTCPPCPGS

SEQ ID NO: 43 - protein, 477 aa, Artificial Sequence
  Humanised
QVQLVQSGAEVKKPGSSVKVSCKASGFYIKDTYMHWVRQAPGQGLEWMGTIDPANGNTKYVPKFQGRVTITADESTSTAYMELSSLRSEDTAVYYCARSIYDDYHYDDYYAMDYWGQGTLVTVSSASTKGPSVFPLAPSSKSTSGGTAALGCLVKDYFPEPVTVSWNSGALTSGVHTFPAVLQSSGLYSLSSVVTVPSSSLGTQTYICNVNHKPSNTKVDKKVEPKSCDKTHTCPPCPAPELLGGPSVFLFPPKPKDTLMISRTPEVTCVVVDVSHEDPEVKFNWYVDGVEVHNAKTKPREEQYNSTYRVVSVLTVLHQDWLNGKEYKCKVSNKALPAPIEKTISKAKGQPREPQVYTLPPSRDELTKNQVSLTCLVKGFYPSDIAVEWESNGQPENNYKTTPPVLDSDGSFFLYSKLTVDKSRWQQGNVFSCSVMHEALHNHYTQKSLSLSPGKGSELQLEESCAEAQDGELDGGS

SEQ ID NO: 44 - protein, 332 aa, Artificial Sequence
  Humanised
DIVMTQSPLSLPVTPGEPASISCRSSQNIVHINGNTYLEWYLQKPGQSPRLLIYKISDRFSGVPDRFSGSGSGTDFTLKISRVEADDVGIYYCFQGSHVPWTFGQGTKLEIKRTVAAPSVFIFPPSDEQLKSGTASVVCLLNNFYPREAKVQWKVDNALQSGNSQESVTEQDSKDSTYSLSSTLTLSKADYEKHKVYACEVTHQGLSSPVTKSFNRGECGGGGSDIQMTQSPSSLSASVGDRVTITCRASRPISDWLHWYQQKPGKAPKLLIAWASTLDSGVPSRFSGSGSGTDFTLTISSLQPEDFATYYCLQEGWGPPTFGQGTKVEIKR

SEQ ID NO: 45 - protein, 332 aa, Artificial Sequence
  Humanised
DIVMTQSPLSLPVTPGEPASISCRSSQNIVHINGNTYLEWYLQKPGQSPRLLIYKISDRFSGVPDRFSGSGSGTDFTLKISRVEADDVGIYYCFQGSHVPWTFGQGTKLEIKRTVAAPSVFIFPPSDEQLKSGTASVVCLLNNFYPREAKVQWKVDNALQSGNSQESVTEQDSKDSTYSLSSTLTLSKADYEKHKVYACEVTHQGLSSPVTKSFNRGECGGGGSDIQMTQSPSSLSASVGDRVTITCRASRPISDWLHWYQQKPGKAPKLLIAWASSLYEGVPSRFSGSGSGTDFTLTISSLQPEDFATYYCLQEGWGPPTFGQGTKVEIKR

SEQ ID NO: 46 - protein, 332 aa, Artificial Sequence
  Humanised
DIVMTQSPLSLPVTPGEPASISCRSSQNIVHINGNTYLEWYLQKPGQSPRLLIYKISDRFSGVPDRFSGSGSGTDFTLKISRVEADDVGIYYCFQGSHVPWTFGQGTKLEIKRTVAAPSVFIFPPSDEQLKSGTASVVCLLNNFYPREAKVQWKVDNALQSGNSQESVTEQDSKDSTYSLSSTLTLSKADYEKHKVYACEVTHQGLSSPVTKSFNRGECGGGGSDIQMTQSPSSLSASVGDRVTITCRASRPISDWLHWYQQKPGKAPKLLIAWASSLQGGVPSRFSGSGSGTDFTLTISSLQPEDFATYYCLQEGWGPPTFGQGTKVEIKR

SEQ ID NO: 47 - protein, 340 aa, Artificial Sequence
  Humanised
DIVMTQSPLSLPVTPGEPASISCRSSQNIVHINGNTYLEWYLQKPGQSPRLLIYKISDRFSGVPDRFSGSGSGTDFTLKISRVEADDVGIYYCFQGSHVPWTFGQGTKLEIKRTVAAPSVFIFPPSDEQLKSGTASVVCLLNNFYPREAKVQWKVDNALQSGNSQESVTEQDSKDSTYSLSSTLTLSKADYEKHKVYACEVTHQGLSSPVTKSFNRGECGGGGSEVQLLESGGGLVQPGGSLRLSCAASGFTFRNFGMGWVRQAPGKGLEWVSWIISSGTETYYADSVKGRFTISRDNSKNTLYLQMNSLRAEDTAVYYCAKSLGRFDYWGQGTLVTVSS

SEQ ID NO: 48 - protein, 571 aa, Artificial Sequence
  Humanised
QVTLRESGPALVKPTQTLTLTCTFSGFSLSTSGMGVSWIRQPPGKGLEWLAHIYWDDDKRYNPSLKSRLTISKDTSRNQVVLTMTNMDPVDTATYYCARRETVFYWYFDVWGRGTLVTVSSASTKGPSVFPLAPSSKSTSGGTAALGCLVKDYFPEPVTVSWNSGALTSGVHTFPAVLQSSGLYSLSSVVTVPSSSLGTQTYICNVNHKPSNTKVDKKVEPKSCDKTHTCPPCPAPELLGGPSVFLFPPKPKDTLMISRTPEVTCVVVDVSHEDPEVKFNWYVDGVEVHNAKTKPREEQYNSTYRVVSVLTVLHQDWLNGKEYKCKVSNKALPAPIEKTISKAKGQPREPQVYTLPPSRDELTKNQVSLTCLVKGFYPSDIAVEWESNGQPENNYKTTPPVLDSDGSFFLYSKLTVDKSRWQQGNVFSCSVMHEALHNHYTQKSLSLSPGKGSGVQLLESGGGLVQPGGSLRLSCAASGFTFAWYDMGWVRQAPGKGLEWVSSIDWHGEVTYYADSVKGRFTISRDNSKNTLYLQMNSLRAEDTAVYYCATAEDEPGYDYWGQGTLVTVSS

SEQ ID NO: 49 - protein, 574 aa, Artificial Sequence
  Humanised
QVTLRESGPALVKPTQTLTLTCTFSGFSLSTSGMGVSWIRQPPGKGLEWLAHIYWDDDKRYNPSLKSRLTISKDTSRNQVVLTMTNMDPVDTATYYCARRETVFYWYFDVWGRGTLVTVSSASTKGPSVFPLAPSSKSTSGGTAALGCLVKDYFPEPVTVSWNSGALTSGVHTFPAVLQSSGLYSLSSVVTVPSSSLGTQTYICNVNHKPSNTKVDKKVEPKSCDKTHTCPPCPAPELLGGPSVFLFPPKPKDTLMISRTPEVTCVVVDVSHEDPEVKFNWYVDGVEVHNAKTKPREEQYNSTYRVVSVLTVLHQDWLNGKEYKCKVSNKALPAPIEKTISKAKGQPREPQVYTLPPSRDELTKNQVSLTCLVKGFYPSDIAVEWESNGQPENNYKTTPPVLDSDGSFFLYSKLTVDKSRWQQGNVFSCSVMHEALHNHYTQKSLSLSPGKGGGGSGVQLLESGGGLVQPGGSLRLSCAASGFTFAWYDMGWVRQAPGKGLEWVSSIDWHGEVTYYADSVKGRFTISRDNSKNTLYLQMNSLRAEDTAVYYCATAEDEPGYDYWGQGTLVTVSS

SEQ ID NO: 50 - protein, 577 aa, Artificial Sequence
  Humanised
QVTLRESGPALVKPTQTLTLTCTFSGFSLSTSGMGVSWIRQPPGKGLEWLAHIYWDDDKRYNPSLKSRLTISKDTSRNQVVLTMTNMDPVDTATYYCARRETVFYWYFDVWGRGTLVTVSSASTKGPSVFPLAPSSKSTSGGTAALGCLVKDYFPEPVTVSWNSGALTSGVHTFPAVLQSSGLYSLSSVVTVPSSSLGTQTYICNVNHKPSNTKVDKKVEPKSCDKTHTCPPCPAPELLGGPSVFLFPPKPKDTLMISRTPEVTCVVVDVSHEDPEVKFNWYVDGVEVHNAKTKPREEQYNSTYRVVSVLTVLHQDWLNGKEYKCKVSNKALPAPIEKTISKAKGQPREPQVYTLPPSRDELTKNQVSLTCLVKGFYPSDIAVEWESNGQPENNYKTTPPVLDSDGSFFLYSKLTVDKSRWQQGNVFSCSVMHEALHNHYTQKSLSLSPGKTVAAPSGSGVQLLESGGGLVQPGGSLRLSCAASGFTFAWYDMGWVRQAPGKGLEWVSSIDWHGEVTYYADSVKGRFTISRDNSKNTLYLQMNSLRAEDTAVYYCATAEDEPGYDYWGQGTLVTVSS

SEQ ID NO: 51 - protein, 580 aa, Artificial Sequence
  Humanised
QVTLRESGPALVKPTQTLTLTCTFSGFSLSTSGMGVSWIRQPPGKGLEWLAHIYWDDDKRYNPSLKSRLTISKDTSRNQVVLTMTNMDPVDTATYYCARRETVFYWYFDVWGRGTLVTVSSASTKGPSVFPLAPSSKSTSGGTAALGCLVKDYFPEPVTVSWNSGALTSGVHTFPAVLQSSGLYSLSSVVTVPSSSLGTQTYICNVNHKPSNTKVDKKVEPKSCDKTHTCPPCPAPELLGGPSVFLFPPKPKDTLMISRTPEVTCVVVDVSHEDPEVKFNWYVDGVEVHNAKTKPREEQYNSTYRVVSVLTVLHQDWLNGKEYKCKVSNKALPAPIEKTISKAKGQPREPQVYTLPPSRDELTKNQVSLTCLVKGFYPSDIAVEWESNGQPENNYKTTPPVLDSDGSFFLYSKLTVDKSRWQQGNVFSCSVMHEALHNHYTQKSLSLSPGKGSASTKGPTGSGVQLLESGGGLVQPGGSLRLSCAASGFTFAWYDMGWVRQAPGKGLEWVSSIDWHGEVTYYADSVKGRFTISRDNSKNTLYLQMNSLRAEDTAVYYCATAEDEPGYDYWGQGTLVTVSS

SEQ ID NO: 52 - protein, 588 aa, Artificial Sequence
  Humanised
QVTLRESGPALVKPTQTLTLTCTFSGFSLSTSGMGVSWIRQPPGKGLEWLAHIYWDDDKRYNPSLKSRLTISKDTSRNQVVLTMTNMDPVDTATYYCARRETVFYWYFDVWGRGTLVTVSSASTKGPSVFPLAPSSKSTSGGTAALGCLVKDYFPEPVTVSWNSGALTSGVHTFPAVLQSSGLYSLSSVVTVPSSSLGTQTYICNVNHKPSNTKVDKKVEPKSCDKTHTCPPCPAPELLGGPSVFLFPPKPKDTLMISRTPEVTCVVVDVSHEDPEVKFNWYVDGVEVHNAKTKPREEQYNSTYRVVSVLTVLHQDWLNGKEYKCKVSNKALPAPIEKTISKAKGQPREPQVYTLPPSRDELTKNQVSLTCLVKGFYPSDIAVEWESNGQPENNYKTTPPVLDSDGSFFLYSKLTVDKSRWQQGNVFSCSVMHEALHNHYTQKSLSLSPGKGSEPKSCDKTHTCPPCPGSGVQLLESGGGLVQPGGSLRLSCAASGFTFAWYDMGWVRQAPGKGLEWVSSIDWHGEVTYYADSVKGRFTISRDNSKNTLYLQMNSLRAEDTAVYYCATAEDEPGYDYWGQGTLVTVSS

SEQ ID NO: 53 - protein, 591 aa, Artificial Sequence
  Humanised
QVTLRESGPALVKPTQTLTLTCTFSGFSLSTSGMGVSWIRQPPGKGLEWLAHIYWDDDKRYNPSLKSRLTISKDTSRNQVVLTMTNMDPVDTATYYCARRETVFYWYFDVWGRGTLVTVSSASTKGPSVFPLAPSSKSTSGGTAALGCLVKDYFPEPVTVSWNSGALTSGVHTFPAVLQSSGLYSLSSVVTVPSSSLGTQTYICNVNHKPSNTKVDKKVEPKSCDKTHTCPPCPAPELLGGPSVFLFPPKPKDTLMISRTPEVTCVVVDVSHEDPEVKFNWYVDGVEVHNAKTKPREEQYNSTYRVVSVLTVLHQDWLNGKEYKCKVSNKALPAPIEKTISKAKGQPREPQVYTLPPSRDELTKNQVSLTCLVKGFYPSDIAVEWESNGQPENNYKTTPPVLDSDGSFFLYSKLTVDKSRWQQGNVFSCSVMHEALHNHYTQKSLSLSPGKGSELQLEESCAEAQDGELDGGSGVQLLESGGGLVQPGGSLRLSCAASGFTFAWYDMGWVRQAPGKGLEWVSSIDWHGEVTYYADSVKGRFTISRDNSKNTLYLQMNSLRAEDTAVYYCATAEDEPGYDYWGQGTLVTVSS

SEQ ID NO: 54 - protein, 338 aa, Artificial Sequence
  Humanised
DIVLTQSPSSLSASVGDRVTITCKASQSVDYDGDSYMNWYQQKPGKAPKLLIYAASNLESGIPSRFSGSGSGTDFTFTISSLQPEDIATYYCQQSNEDPPTFGQGTKVEIKRTVAAPSVFIFPPSDEQLKSGTASVVCLLNNFYPREAKVQWKVDNALQSGNSQESVTEQDSKDSTYSLSSTLTLSKADYEKHKVYACEVTHQGLSSPVTKSFNRGECGSGVQLLESGGGLVQPGGSLRLSCAASGFTFAWYDMGWVRQAPGKGLEWVSSIDWHGEVTYYADSVKGRFTISRDNSKNTLYLQMNSLRAEDTAVYYCATAEDEPGYDYWGQGTLVTVSS

SEQ ID NO: 55 - protein, 341 aa, Artificial Sequence
  Humanised
DIVLTQSPSSLSASVGDRVTITCKASQSVDYDGDSYMNWYQQKPGKAPKLLIYAASNLESGIPSRFSGSGSGTDFTFTISSLQPEDIATYYCQQSNEDPPTFGQGTKVEIKRTVAAPSVFIFPPSDEQLKSGTASVVCLLNNFYPREAKVQWKVDNALQSGNSQESVTEQDSKDSTYSLSSTLTLSKADYEKHKVYACEVTHQGLSSPVTKSFNRGECGGGGSGVQLLESGGGLVQPGGSLRLSCAASGFTFAWYDMGWVRQAPGKGLEWVSSIDWHGEVTYYADSVKGRFTISRDNSKNTLYLQMNSLRAEDTAVYYCATAEDEPGYDYWGQGTLVTVSS

SEQ ID NO: 56 - protein, 344 aa, Artificial Sequence
  Humanised
DIVLTQSPSSLSASVGDRVTITCKASQSVDYDGDSYMNWYQQKPGKAPKLLIYAASNLESGIPSRFSGSGSGTDFTFTISSLQPEDIATYYCQQSNEDPPTFGQGTKVEIKRTVAAPSVFIFPPSDEQLKSGTASVVCLLNNFYPREAKVQWKVDNALQSGNSQESVTEQDSKDSTYSLSSTLTLSKADYEKHKVYACEVTHQGLSSPVTKSFNRGECTVAAPSGSGVQLLESGGGLVQPGGSLRLSCAASGFTFAWYDMGWVRQAPGKGLEWVSSIDWHGEVTYYADSVKGRFTISRDNSKNTLYLQMNSLRAEDTAVYYCATAEDEPGYDYWGQGTLVTVSS

SEQ ID NO: 57 - protein, 345 aa, Artificial Sequence
  Humanised
DIVLTQSPSSLSASVGDRVTITCKASQSVDYDGDSYMNWYQQKPGKAPKLLIYAASNLESGIPSRFSGSGSGTDFTFTISSLQPEDIATYYCQQSNEDPPTFGQGTKVEIKRTVAAPSVFIFPPSDEQLKSGTASVVCLLNNFYPREAKVQWKVDNALQSGNSQESVTEQDSKDSTYSLSSTLTLSKADYEKHKVYACEVTHQGLSSPVTKSFNRGECASTKGPTGSGVQLLESGGGLVQPGGSLRLSCAASGFTFAWYDMGWVRQAPGKGLEWVSSIDWHGEVTYYADSVKGRFTISRDNSKNTLYLQMNSLRAEDTAVYYCATAEDEPGYDYWGQGTLVTVSS

SEQ ID NO: 58 - protein, 353 aa, Artificial Sequence
  Humanised
DIVLTQSPSSLSASVGDRVTITCKASQSVDYDGDSYMNWYQQKPGKAPKLLIYAASNLESGIPSRFSGSGSGTDFTFTISSLQPEDIATYYCQQSNEDPPTFGQGTKVEIKRTVAAPSVFIFPPSDEQLKSGTASVVCLLNNFYPREAKVQWKVDNALQSGNSQESVTEQDSKDSTYSLSSTLTLSKADYEKHKVYACEVTHQGLSSPVTKSFNRGECEPKSCDKTHTCPPCPGSGVQLLESGGGLVQPGGSLRLSCAASGFTFAWYDMGWVRQAPGKGLEWVSSIDWHGEVTYYADSVKGRFTISRDNSKNTLYLQMNSLRAEDTAVYYCATAEDEPGYDYWGQGTLVTVSS

SEQ ID NO: 59 - protein, 356 aa, Artificial Sequence
  Humanised
DIVLTQSPSSLSASVGDRVTITCKASQSVDYDGDSYMNWYQQKPGKAPKLLIYAASNLESGIPSRFSGSGSGTDFTFTISSLQPEDIATYYCQQSNEDPPTFGQGTKVEIKRTVAAPSVFIFPPSDEQLKSGTASVVCLLNNFYPREAKVQWKVDNALQSGNSQESVTEQDSKDSTYSLSSTLTLSKADYEKHKVYACEVTHQGLSSPVTKSFNRGECELQLEESCAEAQDGELDGGSGVQLLESGGGLVQPGGSLRLSCAASGFTFAWYDMGWVRQAPGKGLEWVSSIDWHGEVTYYADSVKGRFTISRDNSKNTLYLQMNSLRAEDTAVYYCATAEDEPGYDYWGQGTLVTVSS

SEQ ID NO: 60 - DNA, 324 bp, Homo Sapiens
gacatccagatgacccaatcaccatcctccctgtctgcatctgtaggagaccgtgtcaccatcacttgccgggcaagtcgccccattagcgactggttacattggtatcagcagaaaccagggaaagcccccaagctcctgatcgcctgggcgtcctcgttgtacgagggggtcccatcacgtttcagtggcagtgggtcggggacagatttcactctcaccatcagcagtctgcaacccgaagatttcgctacgtactactgtttgcaggaggggtggggtcctccgacgttcggccaagggaccaaggtggaaatcaaacgg

SEQ ID NO: 61 - DNA, 324 bp, Homo Sapiens
gacatccagatgacccaatcaccatcctccctgtctgcatctgtaggagaccgtgtcaccatcacttgccgggcaagtcgccccattagcgactggttacattggtatcagcagaaaccagggaaagcccccaagctcctgatcgcctgggcgtccagcttgcaggggggggtcccatcacgtttcagtggcagtgggtcggggacagatttcactctcaccatcagcagtctgcaacccgaagatttcgctacgtactactgtttgcaggaggggtggggtcctccgacgttcggccaagggaccaaggtggaaatcaaacgg

SEQ ID NO: 62 - protein, 129 aa, Homo Sapiens [sequence omitted]

SEQ ID NO: 63 - protein, 112 aa, Homo Sapiens
GPVPPSTALRELIEELVNITQNQKAPLCNGSMVWSINLTAGMYCAALESLINVSGCSAIEKTQRMLSGFCPHKVSAGQFSSLHVRDTKIEVAQFVKDLLLHLKKLFREGRFN

SEQ ID NO: 64 - protein, 19 aa, unknown
  Mammalian Signal Sequence
MGWSCIILFLVATATGVHS

SEQ ID NO: 65 - protein, 449 aa, Artificial Sequence
  Humanised
QVTLRESGPALVKPTQTLTLTCTVSGFSLTSYSVHWVRQPPGKGLEWLGVIWASGGTDYNSALMSRLSISKDTSRNQVVLTMTNMDPVDTATYYCARDPPSSLLRLDYWGRGTLVTVSSASTKGPSVFPLAPSSKSTSGGTAALGCLVKDYFPEPVTVSWNSGALTSGVHTFPAVLQSSGLYSLSSVVTVPSSSLGTQTYICNVNHKPSNTKVDKKVEPKSCDKTHTCPPCPAPELLGGPSVFLFPPKPKDTLMISRTPEVTCVVVDVSHEDPEVKFNWYVDGVEVHNAKTKPREEQYNSTYRVVSVLTVLHQDWLNGKEYKCKVSNKALPAPIEKTISKAKGQPREPQVYTLPPSRDELTKNQVSLTCLVKGFYPSDIAVEWESNGQPENNYKTTPPVLDSDGSFFLYSKLTVDKSRWQQGNVFSCSVMHEALHNHYTQKSLSLSPGK

SEQ ID NO: 66 - protein, 220 aa, Artificial Sequence
  Humanised
DIVMTQSPDSLAVSLGERATINCKSSQSLLNSGNQKNYLAWYQQKPGQPPKLLIYGASTRESGVPDRFSGSGSGTDFTLTISSLQAEDVAVYYCQNVHSFPFTFGGGTKLEIKRTVAAPSVFIFPPSDEQLKSGTASVVCLLNNFYPREAKVQWKVDNALQSGNSQESVTEQDSKDSTYSLSSTLTLSKADYEKHKVYACEVTHQGLSSPVTKSFNRGEC

SEQ ID NO: 67 - protein, 456 aa, Artificial Sequence
  Humanised
QVQLVQSGAEVKKPGASVKVSCKVSGEISTGYYFHWVRQAPGKGLEWMGRIDPEDDSTKYAERFKDRVTMTEDTSTDTAYMELSSLRSEDTAVYYCTTWRIYRDSSGRPFYVMDAWGQGTLVTVSSASTKGPSVFPLAPSSKSTSGGTAALGCLVKDYFPEPVTVSWNSGALTSGVHTFPAVLQSSGLYSLSSVVTVPSSSLGTQTYICNVNHKPSNTKVDKKVEPKSCDKTHTCPPCPAPELLGGPSVFLFPPKPKDTLMISRTPEVTCVVVDVSHEDPEVKFNWYVDGVEVHNAKTKPREEQYNSTYRVVSVLTVLHQDWLNGKEYKCKVSNKALPAPIEKTISKAKGQPREPQVYTLPPSRDELTKNQVSLTCLVKGFYPSDIAVEWESNGQPENNYKTTPPVLDSDGSFFLYSKLTVDKSRWQQGNVFSCSVMHEALHNHYTQKSLSLSPGK

SEQ ID NO: 68 - protein, 214 aa, Artificial Sequence
  Humanised
DIQMTQSPSSVSASVGDRVTITCLASEDIYTYLTWYQQKPGKAPKLLIYGANKLQDGVPSRFSGSGSGTDYTLTISSLQPEDFATYYCLQGSKFPLTFGQGTKLEIKRTVAAPSVFIFPPSDEQLKSGTASVVCLLNNFYPREAKVQWKVDNALQSGNSQESVTEQDSKDSTYSLSSTLTLSKADYEKHKVYACEVTHQGLSSPVTKSFNRGEC

SEQ ID NO: 69 - protein, 577 aa, Artificial Sequence
  Humanised
QVQLVQSGAEVKKPGASVKVSCKVSGEISTGYYFHWVRQAPGKGLEWMGRIDPEDDSTKYAERFKDRVTMTEDTSTDTAYMELSSLRSEDTAVYYCTTWRIYRDSSGRPFYVMDAWGQGTLVTVSSASTKGPSVFPLAPSSKSTSGGTAALGCLVKDYFPEPVTVSWNSGALTSGVHTFPAVLQSSGLYSLSSVVTVPSSSLGTQTYICNVNHKPSNTKVDKKVEPKSCDKTHTCPPCPAPELLGGPSVFLFPPKPKDTLMISRTPEVTCVVVDVSHEDPEVKFNWYVDGVEVHNAKTKPREEQYNSTYRVVSVLTVLHQDWLNGKEYKCKVSNKALPAPIEKTISKAKGQPREPQVYTLPPSRDELTKNQVSLTCLVKGFYPSDIAVEWESNGQPENNYKTTPPVLDSDGSFFLYSKLTVDKSRWQQGNVFSCSVMHEALHNHYTQKSLSLSPGKGGGGSEVQLLESGGGLVQPGGSLRLSCAASGFTFRNFGMGWVRQAPGKGLEWVSWIISSGTETYYADSVKGRFTISRDNSKNTLYLQMNSLRAEDTAVYYCAKSLGRFDYWGQGTLVTVSS

SEQ ID NO: 70 - protein, 337 aa, Artificial Sequence
  Humanised
DIQMTQSPSSVSASVGDRVTITCLASEDIYTYLTWYQQKPGKAPKLLIYGANKLQDGVPSRFSGSGSGTDYTLTISSLQPEDFATYYCLQGSKFPLTFGQGTKLEIKRTVAAPSVFIFPPSDEQLKSGTASVVCLLNNFYPREAKVQWKVDNALQSGNSQESVTEQDSKDSTYSLSSTLTLSKADYEKHKVYACEVTHQGLSSPVTKSFNRGECGGGGSGVQLLESGGGLVQPGGSLRLSCAASGFTFAWYDMGWVRQAPGKGLEWVSSIDWHGEVTYYADSVKGRFTISRDNSKNTLYLQMNSLRAEDTAVYYCATAEDEPGYDYWGQGTLVTVSS

SEQ ID NO: 71 - protein, 570 aa, Artificial Sequence
  Humanised
QVTLRESGPALVKPTQTLTLTCTVSGFSLTSYSVHWVRQPPGKGLEWLGVIWASGGTDYNSALMSRLSISKDTSRNQVVLTMTNMDPVDTATYYCARDPPSSLLRLDYWGRGTLVTVSSASTKGPSVFPLAPSSKSTSGGTAALGCLVKDYFPEPVTVSWNSGALTSGVHTFPAVLQSSGLYSLSSVVTVPSSSLGTQTYICNVNHKPSNTKVDKKVEPKSCDKTHTCPPCPAPELLGGPSVFLFPPKPKDTLMISRTPEVTCVVVDVSHEDPEVKFNWYVDGVEVHNAKTKPREEQYNSTYRVVSVLTVLHQDWLNGKEYKCKVSNKALPAPIEKTISKAKGQPREPQVYTLPPSRDELTKNQVSLTCLVKGFYPSDIAVEWESNGQPENNYKTTPPVLDSDGSFFLYSKLTVDKSRWQQGNVFSCSVMHEALHNHYTQKSLSLSPGKGGGGSEVQLLESGGGLVQPGGSLRLSCAASGFTFRNFGMGWVRQAPGKGLEWVSWIISSGTETYYADSVKGRFTISRDNSKNTLYLQMNSLRAEDTAVYYCAKSLGRFDYWGQGTLVTVSS

SEQ ID NO: 72 - protein, 343 aa, Artificial Sequence
  Humanised
DIVMTQSPDSLAVSLGERATINCKSSQSLLNSGNQKNYLAWYQQKPGQPPKLLIYGASTRESGVPDRFSGSGSGTDFTLTISSLQAEDVAVYYCQNVHSFPFTFGGGTKLEIKRTVAAPSVFIFPPSDEQLKSGTASVVCLLNNFYPREAKVQWKVDNALQSGNSQESVTEQDSKDSTYSLSSTLTLSKADYEKHKVYACEVTHQGLSSPVTKSFNRGECGGGGSGVQLLESGGGLVQPGGSLRLSCAASGFTFAWYDMGWVRQAPGKGLEWVSSIDWHGEVTYYADSVKGRFTISRDNSKNTLYLQMNSLRAEDTAVYYCATAEDEPGYDYWGQGTLVTVSS

SEQ ID NO: 73 - protein, 214 aa, Artificial Sequence
  Humanised
DIQMTQSPSSLSASVGDRVTITCRASQGIRNYLAWYQQKPGKAPKLLIYAASTLQSGVPSRFSGSGSGTDFTLTISSLQPEDVATYYCQRYNRAPYTFGQGTKVEIKRTVAAPSVFIFPPSDEQLKSGTASVVCLLNNFYPREAKVQWKVDNALQSGNSQESVTEQDSKDSTYSLSSTLTLSKADYEKHKVYACEVTHQGLSSPVTKSFNRGEC

SEQ ID NO: 74 - protein, 562 aa, Artificial Sequence
  Humanised
EVQLVESGGGLVQPGRSLRLSCAASGFTFDDYAMHWVRQAPGKGLEWVSAITWNSGHIDYADSVEGRFTISRDNAKNSLYLQMNSLRAEDTAVYYCAKVSYLSTASSLDYWGQGTLVTVSSASTKGPSVFPLAPSSKSTSGGTAALGCLVKDYFPEPVTVSWNSGALTSGVHTFPAVLQSSGLYSLSSVVTVPSSSLGTQTYICNVNHKPSNTKVDKKVEPKSCDKTHTCPPCPAPELLGGPSVFLFPPKPKDTLMISRTPEVTCVVVDVSHEDPEVKFNWYVDGVEVHNAKTKPREEQYNSTYRVVSVLTVLHQDWLNGKEYKCKVSNKALPAPIEKTISKAKGQPREPQVYTLPPSRDELTKNQVSLTCLVKGFYPSDIAVEWESNGQPENNYKTTPPVLDSDGSFFLYSKLTVDKSRWQQGNVFSCSVMHEALHNHYTQKSLSLSPGKSTGDIQMTQSPSSLSASVGDRVTITCRASQWIGNLLDWYQQKPGKAPKLLIYYASFLQSGVPSRFSGSGYGTDFTLTISSLQPEDFATYYCQQANPAPLTFGQGTKVEIKR

SEQ ID NO: 75 - protein, 570 aa, Artificial Sequence
  Humanised
EVQLVESGGGLVQPGRSLRLSCAASGFTFDDYAMHWVRQAPGKGLEWVSAITWNSGHIDYADSVEGRFTISRDNAKNSLYLQMNSLRAEDTAVYYCAKVSYLSTASSLDYWGQGTLVTVSSASTKGPSVFPLAPSSKSTSGGTAALGCLVKDYFPEPVTVSWNSGALTSGVHTFPAVLQSSGLYSLSSVVTVPSSSLGTQTYICNVNHKPSNTKVDKKVEPKSCDKTHTCPPCPAPELLGGPSVFLFPPKPKDTLMISRTPEVTCVVVDVSHEDPEVKFNWYVDGVEVHNAKTKPREEQYNSTYRVVSVLTVLHQDWLNGKEYKCKVSNKALPAPIEKTISKAKGQPREPQVYTLPPSRDELTKNQVSLTCLVKGFYPSDIAVEWESNGQPENNYKTTPPVLDSDGSFFLYSKLTVDKSRWQQGNVFSCSVMHEALHNHYTQKSLSLSPGKSTGEVQLLVSGGGLVQPGGSLRLSCAASGFTFKAYPMMWVRQAPGKGLEWVSEISPSGSYTYYADSVKGRFTISRDNSKNTLYLQMNSLRAEDTAVYYCAKDPRKLDYWGQGTLVTVSS

SEQ ID NO: 76 - protein, 569 aa, Artificial Sequence
  Humanised
EVQLLVSGGGLVQPGGSLRLSCAASGFTFKAYPMMWVRQAPGKGLEWVSEISPSGSYTYYADSVKGRFTISRDNSKNTLYLQMNSLRAEDTAVYYCAKDPRKLDYWGQGTLVTVSSASTKGPSEVQLLESGGGLVQPGGSLRLSCAASGFTFSSYAMSWVRQAPGKGLEWVSAISGSGGSTYYADSVKGRFTISRDNSKNTLYLQMNSLRAEDTAVYYCAKSYGAFDYWGQGTLVTVSSASTKGPSVFPLAPSSKSTSGGTAALGCLVKDYFPEPVTVSWNSGALTSGVHTFPAVLQSSGLYSLSSVVTVPSSSLGTQTYICNVNHKPSNTKVDKKVEPKSCDKTHTCPPCPAPELLGGPSVFLFPPKPKDTLMISRTPEVTCVVVDVSHEDPEVKFNWYVDGVEVHNAKTKPREEQYNSTYRVVSVLTVLHQDWLNGKEYKCKVSNKALPAPIEKTISKAKGQPREPQVYTLPPSRDELTKNQVSLTCLVKGFYPSDIAVEWESNGQPENNYKTTPPVLDSDGSFFLYSKLTVDKSRWQQGNVFSCSVMHEALHNHYTQKSLSLSPGK

SEQ ID NO: 77 - protein, 328 aa, Artificial Sequence
  Humanised
DIQMTQSPSSLSASVGDRVTITCRASQDIYLNLDWYQQKPGKAPKLLINFGSELQSGVPSRFSGSGYGTDFTLTISSLQPEDFATYYCQPSFYFPYTFGQGTKVEIKRTVAAPSDIQMTQSPSSLSASVGDRVTITCRASQSISSYLNWYQQKPGKAPKLLIYAASSLQSGVPSRFSGSGSGTDFTLTISSLQPEDFATYYCQQSYSTPNTFGQGTKVEIKRTVAAPSVFIFPPSDEQLKSGTASVVCLLNNFYPREAKVQWKVDNALQSGNSQESVTEQDSKDSTYSLSSTLTLSKADYEKHKVYACEVTHQGLSSPVTKSFNRGEC

SEQ ID NO: 78 - protein, 574 aa, Artificial Sequence
  Humanised
EVQLLESGGGLVQPGGSLRLSCAASGFTFGAYPMMWVRQAPGKGLEWVSEISPSGSYTYYADSVKGRFTISRDNSKNTLYLQMNSLRAEDTAVYYCAKDPRKFDYWGQGTLVTVSSASTKGPSEVQLVESGGGLVQPGRSLRLSCAASGFTFDDYAMHWVRQAPGKGLEWVSAITWNSGHIDYADSVEGRFTISRDNAKNSLYLQMNSLRAEDTAVYYCAKVSYLSTASSLDYWGQGTLVTVSSASTKGPSVFPLAPSSKSTSGGTAALGCLVKDYFPEPVTVSWNSGALTSGVHTFPAVLQSSGLYSLSSVVTVPSSSLGTQTYICNVNHKPSNTKVDKKVEPKSCDKTHTCPPCPAPELLGGPSVFLFPPKPKDTLMISRTPEVTCVVVDVSHEDPEVKFNWYVDGVEVHNAKTKPREEQYNSTYRVVSVLTVLHQDWLNGKEYKCKVSNKALPAPIEKTISKAKGQPREPQVYTLPPSRDELTKNQVSLTCLVKGFYPSDIAVEWESNGQPENNYKTTPPVLDSDGSFFLYSKLTVDKSRWQQGNVFSCSVMHEALHNHYTQKSLSLSPGK

SEQ ID NO: 79 - protein, 328 aa, Artificial Sequence
  Humanised
DIQMTQSPSSLSASVGDRVTITCRASQWIGNLLDWYQQKPGKAPKLLIYYASFLQSGVPSRFSGSGYGTDFTLTISSLQPEDFATYYCQQANPAPLTFGQGTKVEIKRTVAAPSDIQMTQSPSSLSASVGDRVTITCRASQGIRNYLAWYQQKPGKAPKLLIYAASTLQSGVPSRFSGSGSGTDFTLTISSLQPEDVATYYCQRYNRAPYTFGQGTKVEIKRTVAAPSVFIFPPSDEQLKSGTASVVCLLNNFYPREAKVQWKVDNALQSGNSQESVTEQDSKDSTYSLSSTLTLSKADYEKHKVYACEVTHQGLSSPVTKSFNRGEC

SEQ ID NO: 80 - protein, 14 aa, Mus Musculus
WILYYGRSKWYFDV

SEQ ID NO: 81 - protein, 17 aa, Mus Musculus
NINPNNGGTNYNQKFKD

SEQ ID NO: 82 - protein, 5 aa, Mus Musculus
DYYMN

SEQ ID NO: 83 - protein, 16 aa, Mus Musculus
RSSQSIVQSNGDTYLE

SEQ ID NO: 84 - protein, 7 aa, Mus Musculus
RISNRFS

SEQ ID NO: 85 - protein, 9 aa, Mus M usculus
FQGSHVPYT

SEQ ID NO: 86 - protein, 7 aa, Mus Musculus
RVSNRFS

SEQ ID NO: 87 - protein, 571 aa, Artificial Sequence
  Humanised
QVQLVQSGAEVKKPGSSVKVSCKASGFYIKDTYMHWVRQAPGQGLEWMGTIDPANGNTKYVPKFQGRVTITADESTSTAYMELSSLRSEDTAVYYCARSIYDDYHYDDYYAMDYWGQGTLVTVSSASTKGPSVFPLAPSSKSTSGGTAALGCLVKDYFPEPVTVSWNSGALTSGVHTFPAVLQSSGLYSLSSVVTVPSSSLGTQTYICNVNHKPSNTKVDKKVEPKSCDKTHTCPPCPAPELLGGPSVFLFPPKPKDTLMISRTPEVTCVVVDVSHEDPEVKFNWYVDGVEVHNAKTKPREEQYNSTYRVVSVLTVLHQDWLNGKEYKCKVSNKALPAPIEKTISKAKGQPREPQVYTLPPSRDELTKNQVSLTCLVKGFYPSDIAVEWESNGQPENNYKTTPPVLDSDGSFFLYSKLTVDKSRWQQGNVFSCSVMHEALHNHYTQKSLSLSPGKEVQLLESGGGLVQPGGSLRLSCAASGFTFRNFGMGWVRQAPGKGLEWVSWIISSGTETYYADSVKGRFTISRDNSKNTLYLQMNSLRAEDTAVYYCAKSLGRFDYWGQGTLVTVSS

SEQ ID NO: 88 - protein, 577 aa, Artificial Sequence
  Humanised
QVQLVQSGAEVKKPGSSVKVSCKASGFYIKDTYMHWVRQAPGQGLEWMGTIDPANGNTKYVPKFQGRVTITADESTSTAYMELSSLRSEDTAVYYCARSIYDDYHYDDYYAMDYWGQGTLVTVSSASTKGPSVFPLAPSSKSTSGGTAALGCLVKDYFPEPVTVSWNSGALTSGVHTFPAVLQSSGLYSLSSVVTVPSSSLGTQTYICNVNHKPSNTKVDKKVEPKSCDKTHTCPPCPAPELLGGPSVFLFPPKPKDTLMISRTPEVTCVVVDVSHEDPEVKFNWYVDGVEVHNAKTKPREEQYNSTYRVVSVLTVLHQDWLNGKEYKCKVSNKALPAPIEKTISKAKGQPREPQVYTLPPSRDELTKNQVSLTCLVKGFYPSDIAVEWESNGQPENNYKTTPPVLDSDGSFFLYSKLTVDKSRWQQGNVFSCSVMHEALHNHYTQKSLSLSPGKTVAAPSEVQLLESGGGLVQPGGSLRLSCAASGFTFRNFGMGWVRQAPGKGLEWVSWIISSGTETYYADSVKGRFTISRDNSKNTLYLQMNSLRAEDTAVYYCAKSLGRFDYWGQGTLVTVSS

SEQ ID NO: 89 - protein, 578 aa, Artificial Sequence
  Humanised
QVQLVQSGAEVKKPGSSVKVSCKASGFYIKDTYMHWVRQAPGQGLEWMGTIDPANGNTKYVPKFQGRVTITADESTSTAYMELSSLRSEDTAVYYCARSIYDDYHYDDYYAMDYWGQGTLVTVSSASTKGPSVFPLAPSSKSTSGGTAALGCLVKDYFPEPVTVSWNSGALTSGVHTFPAVLQSSGLYSLSSVVTVPSSSLGTQTYICNVNHKPSNTKVDKKVEPKSCDKTHTCPPCPAPELLGGPSVFLFPPKPKDTLMISRTPEVTCVVVDVSHEDPEVKFNWYVDGVEVHNAKTKPREEQYNSTYRVVSVLTVLHQDWLNGKEYKCKVSNKALPAPIEKTISKAKGQPREPQVYTLPPSRDELTKNQVSLTCLVKGFYPSDIAVEWESNGQPENNYKTTPPVLDSDGSFFLYSKLTVDKSRWQQGNVFSCSVMHEALHNHYTQKSLSLSPGKASTKGPTEVQLLESGGGLVQPGGSLRLSCAASGFTFRNFGMGWVRQAPGKGLEWVSWIISSGTETYYADSVKGRFTISRDNSKNTLYLQMNSLRAEDTAVYYCAKSLGRFDYWGQGTLVTVSS

SEQ ID NO: 90 - protein, 578 aa, Artificial Sequence
  Humanised
QVQLVQSGAEVKKPGSSVKVSCKASGFYIKDTYMHWVRQAPGQGLEWMGTIDPANGNTKYVPKFQGRVTITADESTSTAYMELSSLRSEDTAVYYCARSIYDDYHYDDYYAMDYWGQGTLVTVSSASTKGPSVFPLAPSSKSTSGGTAALGCLVKDYFPEPVTVSWNSGALTSGVHTFPAVLQSSGLYSLSSVVTVPSSSLGTQTYICNVNHKPSNTKVDKKVEPKSCDKTHTCPPCPAPELLGGPSVFLFPPKPKDTLMISRTPEVTCVVVDVSHEDPEVKFNWYVDGVEVHNAKTKPREEQYNSTYRVVSVLTVLHQDWLNGKEYKCKVSNKALPAPIEKTISKAKGQPREPQVYTLPPSRDELTKNQVSLTCLVKGFYPSDIAVEWESNGQPENNYKTTPPVLDSDGSFFLYSKLTVDKSRWQQGNVFSCSVMHEALHNHYTQKSLSLSPGKASTKGPSEVQLLESGGGLVQPGGSLRLSCAASGFTFRNFGMGWVRQAPGKGLEWVSWIISSGTETYYADSVKGRFTISRDNSKNTLYLQMNSLRAEDTAVYYCAKSLGRFDYWGQGTLVTVSS

SEQ ID NO: 91 - protein, 569 aa, Artificial Sequence
  Humanised
QVTLRESGPALVKPTQTLTLTCTFSGFSLSTSGMGVSWIRQPPGKGLEWLAHIYWDDDKRYNPSLKSRLTISKDTSRNQVVLTMTNMDPVDTATYYCARRETVFYWYFDVWGRGTLVTVSSASTKGPSVFPLAPSSKSTSGGTAALGCLVKDYFPEPVTVSWNSGALTSGVHTFPAVLQSSGLYSLSSVVTVPSSSLGTQTYICNVNHKPSNTKVDKKVEPKSCDKTHTCPPCPAPELLGGPSVFLFPPKPKDTLMISRTPEVTCVVVDVSHEDPEVKFNWYVDGVEVHNAKTKPREEQYNSTYRVVSVLTVLHQDWLNGKEYKCKVSNKALPAPIEKTISKAKGQPREPQVYTLPPSRDELTKNQVSLTCLVKGFYPSDIAVEWESNGQPENNYKTTPPVLDSDGSFFLYSKLTVDKSRWQQGNVFSCSVMHEALHNHYTQKSLSLSPGKGVQLLESGGGLVQPGGSLRLSCAASGFTFAWYDMGWVRQAPGKGLEWVSSIDWHGEVTYYADSVKGRFTISRDNSKNTLYLQMNSLRAEDTAVYYCATAEDEPGYDYWGQGTLVTVSS

SEQ ID NO: 92 - protein, 575 aa, Artificial Sequence
  Humanised
QVTLRESGPALVKPTQTLTLTCTFSGFSLSTSGMGVSWIRQPPGKGLEWLAHIYWDDDKRYNPSLKSRLTISKDTSRNQVVLTMTNMDPVDTATYYCARRETVFYWYFDVWGRGTLVTVSSASTKGPSVFPLAPSSKSTSGGTAALGCLVKDYFPEPVTVSWNSGALTSGVHTFPAVLQSSGLYSLSSVVTVPSSSLGTQTYICNVNHKPSNTKVDKKVEPKSCDKTHTCPPCPAPELLGGPSVFLFPPKPKDTLMISRTPEVTCVVVDVSHEDPEVKFNWYVDGVEVHNAKTKPREEQYNSTYRVVSVLTVLHQDWLNGKEYKCKVSNKALPAPIEKTISKAKGQPREPQVYTLPPSRDELTKNQVSLTCLVKGFYPSDIAVEWESNGQPENNYKTTPPVLDSDGSFFLYSKLTVDKSRWQQGNVFSCSVMHEALHNHYTQKSLSLSPGKTVAAPSGVQLLESGGGLVQPGGSLRLSCAASGFTFAWYDMGWVRQAPGKGLEWVSSIDWHGEVTYYADSVKGRFTISRDNSKNTLYLQMNSLRAEDTAVYYCATAEDEPGYDYWGQGTLVTVSS

SEQ ID NO: 93 - protein, 576 aa, Artificial Sequence
  Humanised
QVTLRESGPALVKPTQTLTLTCTFSGFSLSTSGMGVSWIRQPPGKGLEWLAHIYWDDDKRYNPSLKSRLTISKDTSRNQVVLTMTNMDPVDTATYYCARRETVFYWYFDVWGRGTLVTVSSASTKGPSVFPLAPSSKSTSGGTAALGCLVKDYFPEPVTVSWNSGALTSGVHTFPAVLQSSGLYSLSSVVTVPSSSLGTQTYICNVNHKPSNTKVDKKVEPKSCDKTHTCPPCPAPELLGGPSVFLFPPKPKDTLMISRTPEVTCVVVDVSHEDPEVKFNWYVDGVEVHNAKTKPREEQYNSTYRVVSVLTVLHQDWLNGKEYKCKVSNKALPAPIEKTISKAKGQPREPQVYTLPPSRDELTKNQVSLTCLVKGFYPSDIAVEWESNGQPENNYKTTPPVLDSDGSFFLYSKLTVDKSRWQQGNVFSCSVMHEALHNHYTQKSLSLSPGKASTKGPTGVQLLESGGGLVQPGGSLRLSCAASGFTFAWYDMGWVRQAPGKGLEWVSSIDWHGEVTYYADSVKGRFTISRDNSKNTLYLQMNSLRAEDTAVYYCATAEDEPGYDYWGQGTLVTVSS

SEQ ID NO: 94 - protein, 576 aa, Artificial Sequence
  Humanised
QVTLRESGPALVKPTQTLTLTCTFSGFSLSTSGMGVSWIRQPPGKGLEWLAHIYWDDDKRYNPSLKSRLTISKDTSRNQVVLTMTNMDPVDTATYYCARRETVFYWYFDVWGRGTLVTVSSASTKGPSVFPLAPSSKSTSGGTAALGCLVKDYFPEPVTVSWNSGALTSGVHTFPAVLQSSGLYSLSSVVTVPSSSLGTQTYICNVNHKPSNTKVDKKVEPKSCDKTHTCPPCPAPELLGGPSVFLFPPKPKDTLMISRTPEVTCVVVDVSHEDPEVKFNWYVDGVEVHNAKTKPREEQYNSTYRVVSVLTVLHQDWLNGKEYKCKVSNKALPAPIEKTISKAKGQPREPQVYTLPPSRDELTKNQVSLTCLVKGFYPSDIAVEWESNGQPENNYKTTPPVLDSDGSFFLYSKLTVDKSRWQQGNVFSCSVMHEALHNHYTQKSLSLSPGKASTKGPSGVQLLESGGGLVQPGGSLRLSCAASGFTFAWYDMGWVRQAPGKGLEWVSSIDWHGEVTYYADSVKGRFTISRDNSKNTLYLQMNSLRAEDTAVYYCATAEDEPGYDYWGQGTLVTVSS

SEQ ID NO: 95 - protein, 578 aa, Artificial Sequence
  Humanised
QVTLRESGPALVKPTQTLTLTCTFSGFSLSTSGMGVSWIRQPPGKGLEWLAHIYWDDDKRYNPSLKSRLTISKDTSRNQVVLTMTNMDPVDTATYYCARRETVFYWYFDVWGRGTLVTVSSASTKGPSVFPLAPSSKSTSGGTAALGCLVKDYFPEPVTVSWNSGALTSGVHTFPAVLQSSGLYSLSSVVTVPSSSLGTQTYICNVNHKPSNTKVDKKVEPKSCDKTHTCPPCPAPELLGGPSVFLFPPKPKDTLMISRTPEVTCVVVDVSHEDPEVKFNWYVDGVEVHNAKTKPREEQYNSTYRVVSVLTVLHQDWLNGKEYKCKVSNKALPAPIEKTISKAKGQPREPQVYTLPPSRDELTKNQVSLTCLVKGFYPSDIAVEWESNGQPENNYKTTPPVLDSDGSFFLYSKLTVDKSRWQQGNVFSCSVMHEALHNHYTQKSLSLSPGKGSASTKGPSGVQLLESGGGLVQPGGSLRLSCAASGFTFAWYDMGWVRQAPGKGLEWVSSIDWHGEVTYYADSVKGRFTISRDNSKNTLYLQMNSLRAEDTAVYYCATAEDEPGYDYWGQGTLVTVSS

SEQ ID NO: 96 - protein, 578 aa, Artificial Sequence
  Humanised
QVTLRESGPALVKPTQTLTLTCTFSGFSLSTSGMGVSWIRQPPGKGLEWLAHIYWDDDKRYNPSLKSRLTISKDTSRNQVVLTMTNMDPVDTATYYCARRETVFYWYFDVWGRGTLVTVSSASTKGPSVFPLAPSSKSTSGGTAALGCLVKDYFPEPVTVSWNSGALTSGVHTFPAVLQSSGLYSLSSVVTVPSSSLGTQTYICNVNHKPSNTKVDKKVEPKSCDKTHTCPPCPAPELLGGPSVFLFPPKPKDTLMISRTPEVTCVVVDVSHEDPEVKFNWYVDGVEVHNAKTKPREEQYNSTYRVVSVLTVLHQDWLNGKEYKCKVSNKALPAPIEKTISKAKGQPREPQVYTLPPSRDELTKNQVSLTCLVKGFYPSDIAVEWESNGQPENNYKTTPPVLDSDGSFFLYSKLTVDKSRWQQGNVFSCSVMHEALHNHYTQKSLSLSPGKGSASTKGPTGVQLLESGGGLVQPGGSLRLSCAASGFTFAWYDMGWVRQAPGKGLEWVSSIDWHGEVTYYADSVKGRFTISRDNSKNTLYLQMNSLRAEDTAVYYCATAEDEPGYDYWGQGTLVTVSS

SEQ ID NO: 97 - protein, 11 aa, Mus Musculus
GYSITSDFAWN

SEQ ID NO: 98 - protein, 14 aa, Mus Musculus
GYISYSGNYNPSLK

SEQ ID NO: 99 - protein, 9 aa, Mus Musculus
VTAGRGFPY

SEQ ID NO: 100 - protein, 11 aa, Mus Musculus
HSSQDINSNIG

SEQ ID NO: 101 - protein, 7 aa, Mus Musculus
HGINLDD

SEQ ID NO: 102 - protein, 9 aa, Mus Musculus
VQYAQFPWT

SEQ ID NO: 103 - protein, 16 aa, Homo Sapiens
CGADSYEMEEDGVRKC

SEQ ID NO: 104 - protein, 6 aa, Mus Musculus
SDFAWN

SEQ ID NO: 105 - protein, 13 aa, Mus Musculus
YISYSGNYNPSLK

SEQ ID NO: 106 - protein, 7 aa, Mus Musculus
AGRGFPY

SEQ ID NO: 107 - protein, 14 aa, Mus Musculus
YISYSGNYNPSLKS

SEQ ID NO: 108 - protein, 577 aa, Artificial Sequence
  Humanised
QVQLVQSGAEVKKPGASVKVSCKASGYTFTDYYMNWVRQAPGQGLEWMGNINPNNGGTNYNQKFKDRVTMTTDTSTSTAYMELRSLRSDDTAVYYCARWILYYGRSKWYFDVWGRGTLVTVSSASTKGPSVFPLAPSSKSTSGGTAALGCLVKDYFPEPVTVSWNSGALTSGVHTFPAVLQSSGLYSLSSVVTVPSSSLGTQTYICNVNHKPSNTKVDKKVEPKSCDKTHTCPPCPAPELLGGPSVFLFPPKPKDTLMISRTPEVTCVVVDVSHEDPEVKFNWYVDGVEVHNAKTKPREEQYNSTYRVVSVLTVLHQDWLNGKEYKCKVSNKALPAPIEKTISKAKGQPREPQVYTLPPSRDELTKNQVSLTCLVKGFYPSDIAVEWESNGQPENNYKTTPPVLDSDGSFFLYSKLTVDKSRWQQGNVFSCSVMHEALHNHYTQKSLSLSPGKTVAAPSGSEVQLLVSGGGLVQPGGSLRLSCAASGFTFKAYPMMWVRQAPGKGLEWVSEISPSGSYTYYADSVKGRFTISRDNSKNTLYLQMNSLRAEDTAVYYCAKDPRKLDYWGQGTLVTVSS

SEQ ID NO: 109 - protein, 571 aa, Artificial Sequence
  Humanised
QVQLVQSGAEVKKPGASVKVSCKASGYTFTDYYMNWVRQAPGQGLEWMGNINPNNGGTNYNQKFKDRVTMTTDTSTSTAYMELRSLRSDDTAVYYCARWILYYGRSKWYFDVWGRGTLVTVSSASTKGPSVFPLAPSSKSTSGGTAALGCLVKDYFPEPVTVSWNSGALTSGVHTFPAVLQSSGLYSLSSVVTVPSSSLGTQTYICNVNHKPSNTKVDKKVEPKSCDKTHTCPPCPAPELLGGPSVFLFPPKPKDTLMISRTPEVTCVVVDVSHEDPEVKFNWYVDGVEVHNAKTKPREEQYNSTYRVVSVLTVLHQDWLNGKEYKCKVSNKALPAPIEKTISKAKGQPREPQVYTLPPSRDELTKNQVSLTCLVKGFYPSDIAVEWESNGQPENNYKTTPPVLDSDGSFFLYSKLTVDKSRWQQGNVFSCSVMHEALHNHYTQKSLSLSPGKGSEVQLLVSGGGLVQPGGSLRLSCAASGFTFKAYPMMWVRQAPGKGLEWVSEISPSGSYTYYADSVKGRFTISRDNSKNTLYLQMNSLRAEDTAVYYCAKDPRKLDYWGQGTLVTVSS

SEQ ID NO: 110 - protein, 453 aa, Artificial Sequence
  Humanised
QVQLVQSGAEVKKPGASVKVSCKASGYTFTDYYMNWVRQAPGQGLEWMGNINPNNGGTNYNQKFKDRVTMTTDTSTSTAYMELRSLRSDDTAVYYCARWILYYGRSKWYFDVWGRGTLVTVSSASTKGPSVFPLAPSSKSTSGGTAALGCLVKDYFPEPVTVSWNSGALTSGVHTFPAVLQSSGLYSLSSVVTVPSSSLGTQTYICNVNHKPSNTKVDKKVEPKSCDKTHTCPPCPAPELLGGPSVFLFPPKPKDTLMISRTPEVTCVVVDVSHEDPEVKFNWYVDGVEVHNAKTKPREEQYNSTYRVVSVLTVLHQDWLNGKEYKCKVSNKALPAPIEKTISKAKGQPREPQVYTLPPSRDELTKNQVSLTCLVKGFYPSDIAVEWESNGQPENNYKTTPPVLDSDGSFFLYSKLTVDKSRWQQGNVFSCSVMHEALHNHYTQKSLSLSPGK

SEQ ID NO: 111 - protein, 343 aa, Artificial Sequence
  Humanised
DIVMTQSPLSLPVTPGEPASISCRSSQSIVQSNGDTYLEWYLQKPGQSPQLLIYRVSNRFSGVPDRFSGSGSGTDFTLKISRVEAEDVGVYYCFQGSHVPYTFGQGTKLEIKRTVAAPSVFIFPPSDEQLKSGTASVVCLLNNFYPREAKVQWKVDNALQSGNSQESVTEQDSKDSTYSLSSTLTLSKADYEKHKVYACEVTHQGLSSPVTKSFNRGECTVAAPSGSEVQLLVSGGGLVQPGGSLRLSCAASGFTFKAYPMMWVRQAPGKGLEWVSEISPSGSYTYYADSVKGRFTISRDNSKNTLYLQMNSLRAEDTAVYYCAKDPRKLDYWGQGTLVTVSS

SEQ ID NO: 112 - protein, 337 aa, Artificial Sequence
  Humanised
DIVMTQSPLSLPVTPGEPASISCRSSQSIVQSNGDTYLEWYLQKPGQSPQLLIYRVSNRFSGVPDRFSGSGSGTDFTLKISRVEAEDVGVYYCFQGSHVPYTFGQGTKLEIKRTVAAPSVFIFPPSDEQLKSGTASVVCLLNNFYPREAKVQWKVDNALQSGNSQESVTEQDSKDSTYSLSSTLTLSKADYEKHKVYACEVTHQGLSSPVTKSFNRGECGSEVQLLVSGGGLVQPGGSLRLSCAASGFTFKAYPMMWVRQAPGKGLEWVSEISPSGSYTYYADSVKGRFTISRDNSKNTLYLQMNSLRAEDTAVYYCAKDPRKLDYWGQGTLVTVSS

SEQ ID NO: 113 - protein, 219 aa, Artificial Sequence
  Humanised
DIVMTQSPLSLPVTPGEPASISCRSSQSIVQSNGDTYLEWYLQKPGQSPQLLIYRVSNRFSGVPDRFSGSGSGTDFTLKISRVEAEDVGVYYCFQGSHVPYTFGQGTKLEIKRTVAAPSVFIFPPSDEQLKSGTASVVCLLNNFYPREAKVQWKVDNALQSGNSQESVTEQDSKDSTYSLSSTLTLSKADYEKHKVYACEVTHQGLSSPVTKSFNRGEC

SEQ ID NO: 114 - protein, 122 aa, Artificial Sequence
  Humanised
QVQLKQSGPGLVQSSQSLSITCTISGFSLTSHGIYWLRQSPGKGLEWLGVIWSGGSADYNAAFISRLSISKDNSKSQVFFKMNSLQADDTAIYYCARSPYYYRSSLYAMDYWGQGTSVTVSS

SEQ ID NO: 115 - protein, 109 aa, Artificial Sequence
  Humanised
NIVLTQSPKSMSMSIGERVTLSCKASENVGTYVSWYQQKAEQSPKLLIYGASNRHTGVPDRFTGSGSSTDFTLTISSVQAEDLADYHCGQSYSDPLTFGAGTKLELKRA

SEQ ID NO: 116 - protein, 577 aa, Artificial Sequence
  Humanised
QVQLQQPGAELVKPGASVKMSCKASGYTFTSYNMHWVKQTPGRGLEWIGAIYPGNGDTSYNQKFKGKATLTADKSSSTAYMQLSSLTSEDSAVYYCARSTYYGGDWYFNVWGAGTLVTVSSASTKGPSVFPLAPSSKSTSGGTAALGCLVKDYFPEPVTVSWNSGALTSGVHTFPAVLQSSGLYSLSSVVTVPSSSLGTQTYICNVNHKPSNTKVDKKVEPKSCDKTHTCPPCPAPELLGGPSVFLFPPKPKDTLMISRTPEVTCVVVDVSHEDPEVKFNWYVDGVEVHNAKTKPREEQYNSTYRVVSVLTVLHQDWLNGKEYKCKVSNKALPAPIEKTISKAKGQPREPQVYTLPPSRDELTKNQVSLTCLVKGFYPSDIAVEWESNGQPENNYKTTPPVLDSDGSFFLYSKLTVDKSRWQQGNVFSCSVMHEALHNHYTQKSLSLSPGKTVAAPSGSGVQLLESGGGLVQPGGSLRLSCAASGFTFAWYDMGWVRQAPGKGLEWVSSIDWHGEVTYYADSVKGRFTISRDNSKNTLYLQMNSLRAEDTAVYYCATAEDEPGYDYWGQGTLVTVSS

SEQ ID NO: 117 - protein, 213 aa, Artificial Sequence
  Humanised
QIVLSQSPAILSASPGEKVTMTCRASSSVSYIHWFQQKPGSSPKPWIYATSNLASGVPVRFSGSGSGTSYSLTISRVEAEDAATYYCQQWTSNPPTFGGGTKLEIKRTVAAPSVFIFPPSDEQLKSGTASVVCLLNNFYPREAKVQWKVDNALQSGNSQESVTEQDSKDSTYSLSSTLTLSKADYEKHKVYACEVTHQGLSSPVTKSFNRGEC

SEQ ID NO: 118 - protein, 571 aa, Artificial Sequence
  Humanised
QVQLQQPGAELVKPGASVKMSCKASGYTFTSYNMHWVKQTPGRGLEWIGAIYPGNGDTSYNQKFKGKATLTADKSSSTAYMQLSSLTSEDSAVYYCARSTYYGGDWYFNVWGAGTLVTVSSASTKGPSVFPLAPSSKSTSGGTAALGCLVKDYFPEPVTVSWNSGALTSGVHTFPAVLQSSGLYSLSSVVTVPSSSLGTQTYICNVNHKPSNTKVDKKVEPKSCDKTHTCPPCPAPELLGGPSVFLFPPKPKDTLMISRTPEVTCVVVDVSHEDPEVKFNWYVDGVEVHNAKTKPREEQYNSTYRVVSVLTVLHQDWLNGKEYKCKVSNKALPAPIEKTISKAKGQPREPQVYTLPPSRDELTKNQVSLTCLVKGFYPSDIAVEWESNGQPENNYKTTPPVLDSDGSFFLYSKLTVDKSRWQQGNVFSCSVMHEALHNHYTQKSLSLSPGKGSGVQLLESGGGLVQPGGSLRLSCAASGFTFAWYDMGWVRQAPGKGLEWVSSIDWHGEVTYYADSVKGRFTISRDNSKNTLYLQMNSLRAEDTAVYYCATAEDEPGYDYWGQGTLVTVSS

SEQ ID NO: 119 - protein, 339 aa, Artificial Sequence
  Humanised
QIVLSQSPAILSASPGEKVTMTCRASSSVSYIHWFQQKPGSSPKPWIYATSNLASGVPVRFSGSGSGTSYSLTISRVEAEDAATYYCQQWTSNPPTFGGGTKLEIKRTVAAPSVFIFPPSDEQLKSGTASVVCLLNNFYPREAKVQWKVDNALQSGNSQESVTEQDSKDSTYSLSSTLTLSKADYEKHKVYACEVTHQGLSSPVTKSFNRGECTVAAPSGSGVQLLESGGGLVQPGGSLRLSCAASGFTFAWYDMGWVRQAPGKGLEWVSSIDWHGEVTYYADSVKGRFTISRDNSKNTLYLQMNSLRAEDTAVYYCATAEDEPGYDYWGQGTLVTVSS

SEQ ID NO: 120 - protein, 451 aa, Artificial Sequence
  Humanised
QVQLQQPGAELVKPGASVKMSCKASGYTFTSYNMHWVKQTPGRGLEWIGAIYPGNGDTSYNQKFKGKATLTADKSSSTAYMQLSSLTSEDSAVYYCARSTYYGGDWYFNVWGAGTLVTVSSASTKGPSVFPLAPSSKSTSGGTAALGCLVKDYFPEPVTVSWNSGALTSGVHTFPAVLQSSGLYSLSSVVTVPSSSLGTQTYICNVNHKPSNTKVDKKVEPKSCDKTHTCPPCPAPELLGGPSVFLFPPKPKDTLMISRTPEVTCVVVDVSHEDPEVKFNWYVDGVEVHNAKTKPREEQYNSTYRVVSVLTVLHQDWLNGKEYKCKVSNKALPAPIEKTISKAKGQPREPQVYTLPPSRDELTKNQVSLTCLVKGFYPSDIAVEWESNGQPENNYKTTPPVLDSDGSFFLYSKLTVDKSRWQQGNVFSCSVMHEALHNHYTQKSLSLSPGK

SEQ ID NO: 121 - protein, 333 aa, Artificial Sequence
  Humanised
QIVLSQSPAILSASPGEKVTMTCRASSSVSYIHWFQQKPGSSPKPWIYATSNLASGVPVRFSGSGSGTSYSLTISRVEAEDAATYYCQQWTSNPPTFGGGTKLEIKRTVAAPSVFIFPPSDEQLKSGTASVVCLLNNFYPREAKVQWKVDNALQSGNSQESVTEQDSKDSTYSLSSTLTLSKADYEKHKVYACEVTHQGLSSPVTKSFNRGECGSGVQLLESGGGLVQPGGSLRLSCAASGFTFAWYDMGWVRQAPGKGLEWVSSIDWHGEVTYYADSVKGRFTISRDNSKNTLYLQMNSLRAEDTAVYYCATAEDEPGYDYWGQGTLVTVSS

SEQ ID NO: 122 - DNA, 1713 bp, Artificial Sequence
  Humanised
caggtgcagctcgtgcagagcggcgccgaagtgaaaaagcccggcagcagcgtgaaggtgagctgcaaggcctccggcttctacatcaaggacacctacatgcactgggtcaggcaggctcctggccagggcctggagtggatgggcactatcgaccccgccaacggcaacaccaagtacgtgcccaagttccagggcagggtgaccatcaccgccgatgagagcaccagcaccgcctacatggaactgagcagcctgaggtctgaggacaccgccgtgtactattgcgccaggagcatctacgacgactaccactacgacgactactacgccatggactactggggacagggcacactagtgaccgtgtccagcgccagcaccaagggccccagcgtgttccccctggcccccagcagcaagagcaccagcggcggcacagccgccctgggctgcctggtgaaggactacttccccgaaccggtgaccgtgtcctggaacagcggagccctgaccagcggcgtgcacaccttccccgccgtgctgcagagcagcggcctgtacagcctgagcagcgtggtgaccgtgcccagcagcagcctgggcacccagacctacatctgtaacgtgaaccacaagcccagcaacaccaaggtggacaagaaggtggagcccaagagctgtgacaagacccacacctgccccccctgccctgcccccgagctgctgggaggccccagcgtgttcctgttcccccccaagcctaaggacaccctgatgatcagcagaacccccgaggtgacctgtgtggtggtggatgtgagccacgaggaccctgaggtgaagttcaactggtacgtggacggcgtggaggtgcacaatgccaagaccaagcccagggaggagcagtacaacagcacctaccgggtggtgtccgtgctgaccgtgctgcaccaggattggctgaacggcaaggagtacaagtgtaaggtgtccaacaaggccctgcctgcccctatcgagaaaaccatcagcaaggccaagggccagcccagagagccccaggtgtacaccctgccccctagcagagatgagctgaccaagaaccaggtgtccctgacctgcctggtgaagggcttctaccccagcgacatcgccgtggagtgggagagcaacggccagcccgagaacaactacaagaccaccccccctgtgctggacagcgatggcagcttcttcctgtacagcaagctgaccgtggacaagagcagatggcagcagggcaacgtgttcagctgctccgtgatgcacgaggccctgcacaatcactacacccagaagagcctgagcctgtcccctggcaagaccgtggccgccccctcgggatccgacatccagatgacccagagccccagcagcctgagcgccagcgtgggcgacagggtgaccattacctgcagggccagcaggcccatcagcgactggctgcactggtaccaacagaagcccggcaaggctcccaagctgctgatcgcctgggccagcagcctgcagggaggcgtgcccagcaggtttagcggcagcggcagcggcaccgacttcaccctcaccatctcttccctgcagcccgaggacttcgccacctactactgcctgcaggagggctgggggccccctactttcggccagggcaccaaggtggagatcaagagg

SEQ ID NO: 123 - protein, 607 aa, Artificial Sequence
  Humanised
QVQLVQSGAEVKKPGASVKVSCKASGYTFTDYYMNWVRQAPGQGLEWMGNINPNNGGTNYNQKFKDRVTMTTDTSTSTAYMELRSLRSDDTAVYYCARWILYYGRSKWYFDVWGRGTLVTVSSASTKGPSVFPLAPSSKSTSGGTAALGCLVKDYFPEPVTVSWNSGALTSGVHTFPAVLQSSGLYSLSSVVTVPSSSLGTQTYICNVNHKPSNTKVDKKVEPKSCDKTHTCPPCPAPELLGGPSVFLFPPKPKDTLMISRTPEVTCVVVDVSHEDPEVKFNWYVDGVEVHNAKTKPREEQYNSTYRVVSVLTVLHQDWLNGKEYKCKVSNKALPAPIEKTISKAKGQPREPQVYTLPPSRDELTKNQVSLTCLVKGFYPSDIAVEWESNGQPENNYKTTPPVLDSDGSFFLYSKLTVDKSRWQQGNVFSCSVMHEALHNHYTQKSLSLSPGKGSDGGGIRRSMSGTWYLKAMTVDREFPEMNLESVTPMTLTLLKGHNLEAKVTMLISGRCQEVKAVLGRTKERKKYTADGGKHVAYIIPSAVRDHVIFYSEGQLHGKPVRGVKLVGRDPKNNLEALEDFEKAAGARGLSTESILIPRQSETCSPG

SEQ ID NO: 124 - protein, 541 aa, Artificial Sequence
  Humanised
QVQLVQSGAEVKKPGASVKVSCKASGYTFTDYYMNWVRQAPGQGLEWMGNINPNNGGTNYNQKFKDRVTMTTDTSTSTAYMELRSLRSDDTAVYYCARWILYYGRSKWYFDVWGRGTLVTVSSASTKGPSVFPLAPSSKSTSGGTAALGCLVKDYFPEPVTVSWNSGALTSGVHTFPAVLQSSGLYSLSSVVTVPSSSLGTQTYICNVNHKPSNTKVDKKVEPKSCDKTHTCPPCPAPELLGGPSVFLFPPKPKDTLMISRTPEVTCVVVDVSHEDPEVKFNWYVDGVEVHNAKTKPREEQYNSTYRVVSVLTVLHQDWLNGKEYKCKVSNKALPAPIEKTISKAKGQPREPQVYTLPPSRDELTKNQVSLTCLVKGFYPSDIAVEWESNGQPENNYKTTPPVLDSDGSFFLYSKLTVDKSRWQQGNVFSCSVMHEALHNHYTQKSLSLSPGKGSEVVAATPTSLLISWRHPHFPTRYYRITYGETGGNSPVQEFTVPLQPPTATISGLKPGVDYTITVYAVTDGRNGRLLSIPISINYRT

SEQ ID NO: 125 - protein, 613 aa, Artificial Sequence
  Humanised
QVQLVQSGAEVKKPGASVKVSCKASGYTFTDYYMNWVRQAPGQGLEWMGNINPNNGGTNYNQKFKDRVTMTTDTSTSTAYMELRSLRSDDTAVYYCARWILYYGRSKWYFDVWGRGTLVTVSSASTKGPSVFPLAPSSKSTSGGTAALGCLVKDYFPEPVTVSWNSGALTSGVHTFPAVLQSSGLYSLSSVVTVPSSSLGTQTYICNVNHKPSNTKVDKKVEPKSCDKTHTCPPCPAPELLGGPSVFLFPPKPKDTLMISRTPEVTCVVVDVSHEDPEVKFNWYVDGVEVHNAKTKPREEQYNSTYRVVSVLTVLHQDWLNGKEYKCKVSNKALPAPIEKTISKAKGQPREPQVYTLPPSRDELTKNQVSLTCLVKGFYPSDIAVEWESNGQPENNYKTTPPVLDSDGSFFLYSKLTVDKSRWQQGNVFSCSVMHEALHNHYTQKSLSLSPGKTVAAPSGSDGGGIRRSMSGTWYLKAMTVDREFPEMNLESVTPMTLTLLKGHNLEAKVTMLISGRCQEVKAVLGRTKERKKYTADGGKHVAYIIPSAVRDHVIFYSEGQLHGKPVRGVKLVGRDPKNNLEALEDFEKAAGARGLSTESILIPRQSETCSPG

SEQ ID NO: 126 - protein, 513 aa, Artificial Sequence
  Humanised
QVQLVQSGAEVKKPGASVKVSCKASGYTFTDYYMNWVRQAPGQGLEWMGNINPNNGGTNYNQKFKDRVTMTTDTSTSTAYMELRSLRSDDTAVYYCARWILYYGRSKWYFDVWGRGTLVTVSSASTKGPSVFPLAPSSKSTSGGTAALGCLVKDYFPEPVTVSWNSGALTSGVHTFPAVLQSSGLYSLSSVVTVPSSSLGTQTYICNVNHKPSNTKVDKKVEPKSCDKTHTCPPCPAPELLGGPSVFLFPPKPKDTLMISRTPEVTCVVVDVSHEDPEVKFNWYVDGVEVHNAKTKPREEQYNSTYRVVSVLTVLHQDWLNGKEYKCKVSNKALPAPIEKTISKAKGQPREPQVYTLPPSRDELTKNQVSLTCLVKGFYPSDIAVEWESNGQPENNYKTTPPVLDSDGSFFLYSKLTVDKSRWQQGNVFSCSVMHEALHNHYTQKSLSLSPGKGSVDNKFNKELRQAYWEIQALPNLNWTQSRAFIRSLYDDPSQSANLLAEAKKLNDAQAPK

SEQ ID NO: 127 - protein, 519 aa, Artificial Sequence
  Humanised
QVQLVQSGAEVKKPGASVKVSCKASGYTFTDYYMNWVRQAPGQGLEWMGNINPNNGGTNYNQKFKDRVTMTTDTSTSTAYMELRSLRSDDTAVYYCARWILYYGRSKWYFDVWGRGTLVTVSSASTKGPSVFPLAPSSKSTSGGTAALGCLVKDYFPEPVTVSWNSGALTSGVHTFPAVLQSSGLYSLSSVVTVPSSSLGTQTYICNVNHKPSNTKVDKKVEPKSCDKTHTCPPCPAPELLGGPSVFLFPPKPKDTLMISRTPEVTCVVVDVSHEDPEVKFNWYVDGVEVHNAKTKPREEQYNSTYRVVSVLTVLHQDWLNGKEYKCKVSNKALPAPIEKTISKAKGQPREPQVYTLPPSRDELTKNQVSLTCLVKGFYPSDIAVEWESNGQPENNYKTTPPVLDSDGSFFLYSKLTVDKSRWQQGNVFSCSVMHEALHNHYTQKSLSLSPGKTVAAPSGSVDNKFNKELRQAYWEIQALPNLNWTQSRAFIRSLYDDPSQSANLLAEAKKLNDAQAPK

SEQ ID NO: 128 - protein, 578 aa, Artificial Sequence
  Humanised
QVQLVQSGAEVKKPGASVKVSCKASGYTFTDYYMNWVRQAPGQGLEWMGNINPNNGGTNYNQKFKDRVTMTTDTSTSTAYMELRSLRSDDTAVYYCARWILYYGRSKWYFDVWGRGTLVTVSSASTKGPSVFPLAPSSKSTSGGTAALGCLVKDYFPEPVTVSWNSGALTSGVHTFPAVLQSSGLYSLSSVVTVPSSSLGTQTYICNVNHKPSNTKVDKKVEPKSCDKTHTCPPCPAPELLGGPSVFLFPPKPKDTLMISRTPEVTCVVVDVSHEDPEVKFNWYVDGVEVHNAKTKPREEQYNSTYRVVSVLTVLHQDWLNGKEYKCKVSNKALPAPIEKTISKAKGQPREPQVYTLPPSRDELTKNQVSLTCLVKGFYPSDIAVEWESNGQPENNYKTTPPVLDSDGSFFLYSKLTVDKSRWQQGNVFSCSVMHEALHNHYTQKSLSLSPGKGSDLGKKLLEAARAGQDDEVRILMANGADVNAKDEYGLTPLYLATAHGHLEIVEVLLKNGADVNAVDAIGFTPLHLAAFIGHLEIAEVLLKHGADVNAQDKFGKTAFDISIGNGNEDLAEILQKL

SEQ ID NO: 129 - protein, 584 aa, Artificial Sequence [sequence omitted]

SEQ ID NO: 130 - protein, 574 aa, Artificial Sequence
  Humanised
QVTLRESGPALVKPTQTLTLTCTFSGFSLSTSGMGVSWIRQPPGKGLEWLAHIYWDDDKRYNPSLKSRLTISKDTSRNQVVLTMTNMDPVDTATYYCARRETVFYWYFDVWGRGTLVTVSSASTKGPSVFPLAPSSKSTSGGTAALGCLVKDYFPEPVTVSWNSGALTSGVHTFPAVLQSSGLYSLSSVVTVPSSSLGTQTYICNVNHKPSNTKVDKKVEPKSCDKTHTCPPCPAPELLGGPSVFLFPPKPKDTLMISRTPEVTCVVVDVSHEDPEVKFNWYVDGVEVHNAKTKPREEQYNSTYRVVSVLTVLHQDWLNGKEYKCKVSNKALPAPIEKTISKAKGQPREPQVYTLPPSRDELTKNQVSLTCLVKGFYPSDIAVEWESNGQPENNYKTTPPVLDSDGSFFLYSKLTVDKSRWQQGNVFSCSVMHEALHNHYTQKSLSLSPGKGSQVQLVESGGGLVQAGGSLRLSCAASGYAYTYIYMGWFRQAPGKEREGVAAMDSGGGGTLYADSVKGRFTISRDKGKNTVYLQMDSLKPEDTATYYCAAGGYELRDRTYGQWGQGTQVTVSS

SEQ ID NO: 131 - protein, 566 aa, Artificial Sequence
  Humanised
QVTLRESGPALVKPTQTLTLTCTFSGFSLSTSGMGVSWIRQPPGKGLEWLAHIYWDDDKRYNPSLKSRLTISKDTSRNQVVLTMTNMDPVDTATYYCARRETVFYWYFDVWGRGTLVTVSSASTKGPSVFPLAPSSKSTSGGTAALGCLVKDYFPEPVTVSWNSGALTSGVHTFPAVLQSSGLYSLSSVVTVPSSSLGTQTYICNVNHKPSNTKVDKKVEPKSCDKTHTCPPCPAPELLGGPSVFLFPPKPKDTLMISRTPEVTCVVVDVSHEDPEVKFNWYVDGVEVHNAKTKPREEQYNSTYRVVSVLTVLHQDWLNGKEYKCKVSNKALPAPIEKTISKAKGQPREPQVYTLPPSRDELTKNQVSLTCLVKGFYPSDIAVEWESNGQPENNYKTTPPVLDSDGSFFLYSKLTVDKSRWQQGNVFSCSVMHEALHNHYTQKSLSLSPGKGSARVDQTPRSVTKETGESLTINCVLRDASYALGSTCWYRKKSGEGNEESISKGGRYVETVNSGSKSFSLRINDLTVEDGGTYRCGLGVAGGYCDYALCSSRYAECGDGTAVTVN

SEQ ID NO: 132 - protein, 1659 aa, Artificial Sequence
  Humanised
CAGGTGACCCTGAGGGAGAGCGGCCCCGCCCTGGTGAAGCCCACCCAGACCCTGACCCTGACCTGCACCTTCAGCGGCTTTAGCCTCAGCACCTCCGGCATGGGCGTGAGCTGGATCAGGCAGCCACCCGGCAAAGGCCTGGAGTGGCTGGCCCACATCTACTGGGACGACGACAAGAGGTACAACCCCAGCCTGAAGAGCCGGCTGACCATCAGCAAGGATACCAGCAGGAACCAGGTGGTGCTGACCATGACCAACATGGACCCCGTGGACACCGCTACCTACTACTGCGCCAGGAGGGAGACCGTCTTCTACTGGTACTTCGACGTGTGGGGAAGGGGCACACTAGTGACCGTGTCCAGCGCCAGCACCAAGGGCCCCAGCGTGTTCCCCCTGGCCCCCAGCAGCAAGAGCACCAGCGGCGGCACAGCCGCCCTGGGCTGCCTGGTGAAGGACTACTTCCCCGAACCGGTGACCGTGTCCTGGAACAGCGGAGCCCTGACCAGCGGCGTGCACACCTTCCCCGCCGTGCTGCAGAGCAGCGGCCTGTACAGCCTGAGCAGCGTGGTGACCGTGCCCAGCAGCAGCCTGGGCACCCAGACCTACATCTGTAACGTGAACCACAAGCCCAGCAACACCAAGGTGGACAAGAAGGTGGAGCCCAAGAGCTGTGACAAGACCCACACCTGCCCCCCCTGCCCTGCCCCCGAGCTGCTGGGAGGCCCCAGCGTGTTCCTGTTCCCCCCCAAGCCTAAGGACACCCTGATGATCAGCAGAACCCCCGAGGTGACCTGTGTGGTGGTGGATGTGAGCCACGAGGACCCTGAGGTGAAGTTCAACTGGTACGTGGACGGCGTGGAGGTGCACAATGCCAAGACCAAGCCCAGGGAGGAGCAGTACAACAGCACCTACCGGGTGGTGTCCGTGCTGACCGTGCTGCACCAGGATTGGCTGAACGGCAAGGAGTACAAGTGTAAGGTGTCCAACAAGGCCCTGCCTGCCCCTATCGAGAAAACCATCAGCAAGGCCAAGGGCCAGCCCAGAGAGCCCCAGGTGTACACCCTGCCCCCTAGCAGAGATGAGCTGACCAAGAACCAGGTGTCCCTGACCTGCCTGGTGAAGGGCTTCTACCCCAGCGACATCGCCGTGGAGTGGGAGAGCAACGGCCAGCCCGAGAACAACTACAAGACCACCCCCCCTGTGCTGGACAGCGATGGCAGCTTCTTCCTGTACAGCAAGCTGACCGTGGACAAGAGCAGATGGCAGCAGGGCAACGTGTTCAGCTGCTCCGTGATGCACGAGGCCCTGCACAATCACTACACCCAGAAGAGCCTGAGCCTGTCCCCTGGCAAGACCGTGGCCGCCCCCTCGGGATCCGTGAGCGACGTGCCAAGGGACCTCGAGGTGGTGGCAGCCACTCCCACCTCTCTGCTGATCAGCTGGGACACACACAACGCCTACAACGGCTACTACAGGATCACCTACGGAGAGACCGGCGGCAATAGCCCCGTGAGGGAGTTCACCGTGCCCCACCCCGAGGTGACCGCCACCATTAGCGGCCTGAAGCCCGGCGTGGACGATACCATCACCGTCTACGCCGTGACCAACCACCACATGCCCCTGAGGATCTTCGGCCCCATCAGCATCAACCATAGGACC

SEQ ID NO: 133 - protein, 547 aa, Artificial Sequence [sequence omitted]

SEQ ID NO: 134 - protein, 551 aa, Artificial Sequence
  Humanised
QVQLVQSGAEVKKPGSSVKVSCKASGFYIKDTYMHWVRQAPGQGLEWMGTIDPANGNTKYVPKFQGRVTITADESTSTAYMELSSLRSEDTAVYYCARSIYDDYHYDDYYAMDYWGQGTLVTVSSASTKGPSVFPLAPSSKSTSGGTAALGCLVKDYFPEPVTVSWNSGALTSGVHTFPAVLQSSGLYSLSSVVTVPSSSLGTQTYICNVNHKPSNTKVDKKVEPKSCDKTHTCPPCPAPELLGGPSVFLFPPKPKDTLMISRTPEVTCVVVDVSHEDPEVKFNWYVDGVEVHNAKTKPREEQYNSTYRVVSVLTVLHQDWLNGKEYKCKVSNKALPAPIEKTISKAKGQPREPQVYTLPPSRDELTKNQVSLTCLVKGFYPSDIAVEWESNGQPENNYKTTPPVLDSDGSFFLYSKLTVDKSRWQQGNVFSCSVMHEALHNHYTQKSLSLSPGKGSVSDVPRDLEVVAATPTSLLISWDTHNAYNGYYRITYGETGGNSPVREFTVPHPEVTATISGLKPGVDDTITVYAVTNHHMPLRIFGPISINHRT

SEQ ID NO: 135 - protein, 557 aa, Artificial Sequence
  Humanised
QVQLVQSGAEVKKPGSSVKVSCKASGFYIKDTYMHWVRQAPGQGLEWMGTIDPANGNTKYVPKFQGRVTITADESTSTAYMELSSLRSEDTAVYYCARSIYDDYHYDDYYAMDYWGQGTLVTVSSASTKGPSVFPLAPSSKSTSGGTAALGCLVKDYFPEPVTVSWNSGALTSGVHTFPAVLQSSGLYSLSSVVTVPSSSLGTQTYICNVNHKPSNTKVDKKVEPKSCDKTHTCPPCPAPELLGGPSVFLFPPKPKDTLMISRTPEVTCVVVDVSHEDPEVKFNWYVDGVEVHNAKTKPREEQYNSTYRVVSVLTVLHQDWLNGKEYKCKVSNKALPAPIEKTISKAKGQPREPQVYTLPPSRDELTKNQVSLTCLVKGFYPSDIAVEWESNGQPENNYKTTPPVLDSDGSFFLYSKLTVDKSRWQQGNVFSCSVMHEALHNHYTQKSLSLSPGKTVAAPSGSVSDVPRDLEVVAATPTSLLISWDTHNAYNGYYRITYGETGGNSPVREFTVPHPEVTATISGLKPGVDDTITVYAVTNHHMPLRIFGPISINHRT

SEQ ID NO: 136 - protein, 537 aa, Artificial Sequence
  Humanised
QVQLKQSGPGLVQPSQSLSITCTVSGFSLTNYGVHWVRQSPGKGLEWLGVIWSGGNTDYNTPFTSRLSINKDNSKSQVFFKMNSLQSNDTAIYYCARALTYYDYEFAYWGQGTLVTVSAASTKGPSVFPLAPSSKSTSGGTAALGCLVKDYFPEPVTVSWNSGALTSGVHTFPAVLQSSGLYSLSSVVTVPSSSLGTQTYICNVNHKPSNTKVDKKVEPKSCDKTHTCPPCPAPELLGGPSVFLFPPKPKDTLMISRTPEVTCVVVDVSHEDPEVKFNWYVDGVEVHNAKTKPREEQYNSTYRVVSVLTVLHQDWLNGKEYKCKVSNKALPAPIEKTISKAKGQPREPQVYTLPPSRDELTKNQVSLTCLVKGFYPSDIAVEWESNGQPENNYKTTPPVLDSDGSFFLYSKLTVDKSRWQQGNVFSCSVMHEALHNHYTQKSLSLSPGKRSEVVAATPTSLLISWRHPHFPTRYYRITYGETGGNSPVQEFTVPLQPPTATISGLKPGVDYTITVYAVTDGRNGRLLSIPISINYRT

SEQ ID NO: 137 - protein, 214 aa, Artificial Sequence
  Humanised
DILLTQSPVILSVSPGERVSFSCRASQSIGTNIHWYQQRTNGSPRLLIKYASESISGIPSRFSGSGSGTDFTLSINSVESEDIADYYCQQNNNWPTTFGAGTKLELKRTVAAPSVFIFPPSDEQLKSGTASVVCLLNNFYPREAKVQWKVDNALQSGNSQESVTEQDSKDSTYSLSSTLTLSKADYEKHKVYACEVTHQGLSSPVTKSFNRGEC

SEQ ID NO: 138 - protein, 302 aa, Artificial Sequence
  Humanised
DILLTQSPVILSVSPGERVSFSCRASQSIGTNIHWYQQRTNGSPRLLIKYASESISGIPSRFSGSGSGTDFTLSINSVESEDIADYYCQQNNNWPTTFGAGTKLELKRTVAAPSVFIFPPSDEQLKSGTASVVCLLNNFYPREAKVQWKVDNALQSGNSQESVTEQDSKDSTYSLSSTLTLSKADYEKHKVYACEVTHQGLSSPVTKSFNRGECRSEVVAATPTSLLISWRHPHFPTRYYRITYGETGGNSPVQEFTVPLQPPTATISGLKPGVDYTITVYAVTDGRNGRLLSIPISINYRT

SEQ ID NO: 139 - protein, 449 aa, Artificial Sequence
  Humanised
QVQLKQSGPGLVQPSQSLSITCTVSGFSLTNYGVHWVRQSPGKGLEWLGVIWSGGNTDYNTPFTSRLSINKDNSKSQVFFKMNSLQSNDTAIYYCARALTYYDYEFAYWGQGTLVTVSAASTKGPSVFPLAPSSKSTSGGTAALGCLVKDYFPEPVTVSWNSGALTSGVHTFPAVLQSSGLYSLSSVVTVPSSSLGTQTYICNVNHKPSNTKVDKKVEPKSCDKTHTCPPCPAPELLGGPSVFLFPPKPKDTLMISRTPEVTCVVVDVSHEDPEVKFNWYVDGVEVHNAKTKPREEQYNSTYRVVSVLTVLHQDWLNGKEYKCKVSNKALPAPIEKTISKAKGQPREPQVYTLPPSRDELTKNQVSLTCLVKGFYPSDIAVEWESNGQPENNYKTTPPVLDSDGSFFLYSKLTVDKSRWQQGNVFSCSVMHEALHNHYTQKSLSLSPGK

SEQ ID NO: 140 - protein, 539 aa, Artificial Sequence
  Humanised
QVQLQESGPGLVKPSQTLSLTCTVSGGSISSGDYYWSWIRQPPGKGLEWIGYIYYSGSTDYNPSLKSRVTMSVDTSKNQFSLKVNSVTAADTAVYYCARVSIFGVGTFDYWGQGTLVTVSSASTKGPSVFPLAPSSKSTSGGTAALGCLVKDYFPEPVTVSWNSGALTSGVHTFPAVLQSSGLYSLSSVVTVPSSSLGTQTYICNVNHKPSNTKVDKKVEPKSCDKTHTCPPCPAPELLGGPSVFLFPPKPKDTLMISRTPEVTCVVVDVSHEDPEVKFNWYVDGVEVHNAKTKPREEQYNSTYRVVSVLTVLHQDWLNGKEYKCKVSNKALPAPIEKTISKAKGQPREPQVYTLPPSRDELTKNQVSLTCLVKGFYPSDIAVEWESNGQPENNYKTTPPVLDSDGSFFLYSKLTVDKSRWQQGNVFSCSVMHEALHNHYTQKSLSLSPGKGSEVVAATPTSLLISWRHPHFPTRYYRITYGETGGNSPVQEFTVPLQPPTATISGLKPGVDYTITVYAVTDGRNGRLLSIPISINYRT

SEQ ID NO: 141 - protein, 214 aa, Artificial Sequence
  Humanised
EIVMTQSPATLSLSPGERATLSCRASQSVSSYLAWYQQKPGQAPRLLIYDASNRATGIPARFSGSGSGTDFTLTISSLEPEDFAVYYCHQYGSTPLTFGGGTKAEIKRTVAAPSVFIFPPSDEQLKSGTASVVCLLNNFYPREAKVQWKVDNALQSGNSQESVTEQDSKDSTYSLSSTLTLSKADYEKHKVYACEVTHQGLSSPVTKSFNRGEC

SEQ ID NO: 142 - protein, 302 aa, Artificial Sequence [sequence omitted]

SEQ ID NO: 143 - protein, 451 aa, Artificial Sequence
  Humanised
QVQLQESGPGLVKPSQTLSLTCTVSGGSISSGDYYWSWIRQPPGKGLEWIGYIYYSGSTDYNPSLKSRVTMSVDTSKNQFSLKVNSVTAADTAVYYCARVSIFGVGTFDYWGQGTLVTVSSASTKGPSVFPLAPSSKSTSGGTAALGCLVKDYFPEPVTVSWNSGALTSGVHTFPAVLQSSGLYSLSSVVTVPSSSLGTQTYICNVNHKPSNTKVDKKVEPKSCDKTHTCPPCPAPELLGGPSVFLFPPKPKDTLMISRTPEVTCVVVDVSHEDPEVKFNWYVDGVEVHNAKTKPREEQYNSTYRVVSVLTVLHQDWLNGKEYKCKVSNKALPAPIEKTISKAKGQPREPQVYTLPPSRDELTKNQVSLTCLVKGFYPSDIAVEWESNGQPENNYKTTPPVLDSDGSFFLYSKLTVDKSRWQQGNVFSCSVMHEALHNHYTQKSLSLSPGK

SEQ ID NO: 144 - protein, 539 aa, Artificial Sequence
  Humanised
EVVAATPTSLLISWRHPHFPTRYYRITYGETGGNSPVQEFTVPLQPPTATISGLKPGVDYTITVYAVTDGRNGRLLSIPISINYRTGSTGQVQLKQSGPGLVQPSQSLSITCTVSGFSLTNYGVHWVRQSPGKGLEWLGVIWSGGNTDYNTPFTSRLSINKDNSKSQVFFKMNSLQSNDTAIYYCARALTYYDYEFAYWGQGTLVTVSAASTKGPSVFPLAPSSKSTSGGTAALGCLVKDYFPEPVTVSWNSGALTSGVHTFPAVLQSSGLYSLSSVVTVPSSSLGTQTYICNVNHKPSNTKVDKKVEPKSCDKTHTCPPCPAPELLGGPSVFLFPPKPKDTLMISRTPEVTCVVVDVSHEDPEVKFNWYVDGVEVHNAKTKPREEQYNSTYRVVSVLTVLHQDWLNGKEYKCKVSNKALPAPIEKTISKAKGQPREPQVYTLPPSRDELTKNQVSLTCLVKGFYPSDIAVEWESNGQPENNYKTTPPVLDSDGSFFLYSKLTVDKSRWQQGNVFSCSVMHEALHNHYTQKSLSLSPGK

SEQ ID NO: 145 - protein, 303 aa, Artificial Sequence
  Humanised
EVVAATPTSLLISWRHPHFPTRYYRITYGETGGNSPVQEFTVPLQPPTATISGLKPGVDYTITVYAVTDGRNGRLLSIPISINYRTSTGDILLTQSPVILSVSPGERVSFSCRASQSIGTNIHWYQQRTNGSPRLLIKYASESISGIPSRFSGSGSGTDFTLSINSVESEDIADYYCQQNNNWPTTFGAGTKLELKRTVAAPSVFIFPPSDEQLKSGTASVVCLLNNFYPREAKVQWKVDNALQSGNSQESVTEQDSKDSTYSLSSTLTLSKADYEKHKVYACEVTHQGLSSPVTKSFNRGEC

SEQ ID NO: 146 - protein, 547 aa, Artificial Sequence
  Humanised
QVTLRESGPALVKPTQTLTLTCTFSGFSLSTSGMGVSWIRQPPGKGLEWLAHIYWDDDKRYNPSLKSRLTISKDTSRNQVVLTMTNMDPVDTATYYCARRETVFYWYFDVWGRGTLVTVSSASTKGPSVFPLAPSSKSTSGGTAALGCLVKDYFPEPVTVSWNSGALTSGVHTFPAVLQSSGLYSLSSVVTVPSSSLGTQTYICNVNHKPSNTKVDKKVEPKSCDKTHTCPPCPAPELLGGPSVFLFPPKPKDTLMISRTPEVTCVVVDVSHEDPEVKFNWYVDGVEVHNAKTKPREEQYNSTYRVVSVLTVLHQDWLNGKEYKCKVSNKALPAPIEKTISKAKGQPREPQVYTLPPSRDELTKNQVSLTCLVKGFYPSDIAVEWESNGQPENNYKTTPPVLDSDGSFFLYSKLTVDKSRWQQGNVFSCSVMHEALHNHYTQKSLSLSPGKGSVSDVPRDLEVVAATPTSLLISWDTHNAYNGYYRITYGETGGNSPVREFTVPHPEVTATISGLKPGVDDTITVYAVTNHHMPLRIFGPISINHRT

SEQ ID NO: 147 - protein, 553 aa, Artificial Sequence
  Humanised
QVTLRESGPALVKPTQTLTLTCTFSGFSLSTSGMGVSWIRQPPGKGLEWLAHIYWDDDKRYNPSLKSRLTISKDTSRNQVVLTMTNMDPVDTATYYCARRETVFYWYFDVWGRGTLVTVSSASTKGPSVFPLAPSSKSTSGGTAALGCLVKDYFPEPVTVSWNSGALTSGVHTFPAVLQSSGLYSLSSVVTVPSSSLGTQTYICNVNHKPSNTKVDKKVEPKSCDKTHTCPPCPAPELLGGPSVFLFPPKPKDTLMISRTPEVTCVVVDVSHEDPEVKFNWYVDGVEVHNAKTKPREEQYNSTYRVVSVLTVLHQDWLNGKEYKCKVSNKALPAPIEKTISKAKGQPREPQVYTLPPSRDELTKNQVSLTCLVKGFYPSDIAVEWESNGQPENNYKTTPPVLDSDGSFFLYSKLTVDKSRWQQGNVFSCSVMHEALHNHYTQKSLSLSPGKTVAAPSGSVSDVPRDLEVVAATPTSLLISWDTHNAYNGYYRITYGETGGNSPVREFTVPHPEVTATISGLKPGVDDTITVYAVTNHHMPLRIFGPISINHRT

SEQ ID NO: 148 - protein, 118 aa, Homo Sapiens
GVQLLESGGGLVQPGGSLRLSCAASGFVFPWYDMGWVRQAPGKGLEWVSSIDWHGKITYYADSVKGRFTISRDNSKNTLYLQMNSLRAEDTAVYYCATAEDEPGYDYWGQGTLVTVSS

SEQ ID NO: 149 - protein, 569 aa, Artificial Sequence
  Humanised
QVTLRESGPALVKPTQTLTLTCTFSGFSLSTSGMGVSWIRQPPGKGLEWLAHIYWDDDKRYNPSLKSRLTISKDTSRNQVVLTMTNMDPVDTATYYCARRETVFYWYFDVWGRGTLVTVSSASTKGPSVFPLAPSSKSTSGGTAALGCLVKDYFPEPVTVSWNSGALTSGVHTFPAVLQSSGLYSLSSVVTVPSSSLGTQTYICNVNHKPSNTKVDKKVEPKSCDKTHTCPPCPAPELLGGPSVFLFPPKPKDTLMISRTPEVTCVVVDVSHEDPEVKFNWYVDGVEVHNAKTKPREEQYNSTYRVVSVLTVLHQDWLNGKEYKCKVSNKALPAPIEKTISKAKGQPREPQVYTLPPSRDELTKNQVSLTCLVKGFYPSDIAVEWESNGQPENNYKTTPPVLDSDGSFFLYSKLTVDKSRWQQGNVFSCSVMHEALHNHYTQKSLSLSPGKGVQLLESGGGLVQPGGSLRLSCAASGFVFPWYDMGWVRQAPGKGLEWVSSIDWHGKITYYADSVKGRFTISRDNSKNTLYLQMNSLRAEDTAVYYCATAEDEPGYDYWGQGTLVTVSS

SEQ ID NO: 150 - protein, 575 aa, Artificial Sequence
  Humanised
QVTLRESGPALVKPTQTLTLTCTFSGFSLSTSGMGVSWIRQPPGKGLEWLAHIYWDDDKRYNPSLKSRLTISKDTSRNQVVLTMTNMDPVDTATYYCARRETVFYWYFDVWGRGTLVTVSSASTKGPSVFPLAPSSKSTSGGTAALGCLVKDYFPEPVTVSWNSGALTSGVHTFPAVLQSSGLYSLSSVVTVPSSSLGTQTYICNVNHKPSNTKVDKKVEPKSCDKTHTCPPCPAPELLGGPSVFLFPPKPKDTLMISRTPEVTCVVVDVSHEDPEVKFNWYVDGVEVHNAKTKPREEQYNSTYRVVSVLTVLHQDWLNGKEYKCKVSNKALPAPIEKTISKAKGQPREPQVYTLPPSRDELTKNQVSLTCLVKGFYPSDIAVEWESNGQPENNYKTTPPVLDSDGSFFLYSKLTVDKSRWQQGNVFSCSVMHEALHNHYTQKSLSLSPGKTVAAPSGVQLLESGGGLVQPGGSLRLSCAASGFVFPWYDMGWVRQAPGKGLEWVSSIDWHGKITYYADSVKGRFTISRDNSKNTLYLQMNSLRAEDTAVYYCATAEDEPGYDYWGQGTLVTVSS

SEQ ID NO: 151 - protein, 579 aa, Artificial Sequence
  Humanised
QVQLVQSGAEVKKPGASVKVSCKASGFYIKDTYMHWVRQAPGQGLEWMGTIDPANGNTKYVPKFQGRVTMTTDTSTSTAYMELRSLRSDDTAVYYCARSIYDDYHYDDYYAMDYWGQGTLVTVSSASTKGPSVFPLAPSSKSTSGGTAALGCLVKDYFPEPVTVSWNSGALTSGVHTFPAVLQSSGLYSLSSVVTVPSSSLGTQTYICNVNHKPSNTKVDKKVEPKSCDKTHTCPPCPAPELLGGPSVFLFPPKPKDTLMISRTPEVTCVVVDVSHEDPEVKFNWYVDGVEVHNAKTKPREEQYNSTYRVVSVLTVLHQDWLNGKEYKCKVSNKALPAPIEKTISKAKGQPREPQVYTLPPSRDELTKNQVSLTCLVKGFYPSDIAVEWESNGQPENNYKTTPPVLDSDGSFFLYSKLTVDKSRWQQGNVFSCSVMHEALHNHYTQKSLSLSPGKTVAAPSGSEVQLLESGGGLVQPGGSLRLSCAASGFTFRNFGMGWVRQAPGKGLEWVSWIISSGTETYYADSVKGRFTISRDNSKNTLYLQMNSLRAEDTAVYYCAKSLGRFDYWGQGTLVTVSS

SEQ ID NO: 152 - protein, 579 aa, Artificial Sequence
  Humanised
EVQLVQSGAEVKKPGESLKISCKGSGFYIKDTYMHWVRQMPGKGLEWMGTIDPANGNTKYVPKFQGQVTISADKSISTAYLQWSSLKASDTAMYYCARSIYDDYHYDDYYAMDYWGQGTLVTVSSASTKGPSVFPLAPSSKSTSGGTAALGCLVKDYFPEPVTVSWNSGALTSGVHTFPAVLQSSGLYSLSSVVTVPSSSLGTQTYICNVNHKPSNTKVDKKVEPKSCDKTHTCPPCPAPELLGGPSVFLFPPKPKDTLMISRTPEVTCVVVDVSHEDPEVKFNWYVDGVEVHNAKTKPREEQYNSTYRVVSVLTVLHQDWLNGKEYKCKVSNKALPAPIEKTISKAKGQPREPQVYTLPPSRDELTKNQVSLTCLVKGFYPSDIAVEWESNGQPENNYKTTPPVLDSDGSFFLYSKLTVDKSRWQQGNVFSCSVMHEALHNHYTQKSLSLSPGKTVAAPSGSEVQLLESGGGLVQPGGSLRLSCAASGFTFRNFGMGWVRQAPGKGLEWVSWIISSGTETYYADSVKGRFTISRDNSKNTLYLQMNSLRAEDTAVYYCAKSLGRFDYWGQGTLVTVSS

SEQ ID NO: 153 - protein, 219 aa, Artificial Sequence
  Humanised
EIVLTQSPATLSLSPGERATLSCRSSQNIVHINGNTYLEWYQQKPGQAPRLLIYKISDRFSGIPARFSGSGSGTDFTLTISSLEPEDFAVYYCFQGSHVPWTFGGGTKVEIKRTVAAPSVFIFPPSDEQLKSGTASVVCLLNNFYPREAKVQWKVDNALQSGNSQESVTEQDSKDSTYSLSSTLTLSKADYEKHKVYACEVTHQGLSSPVTKSFNRGEC

SEQ ID NO: 154 - protein, 219 aa, Artificial Sequence; identical to SEQ ID NO: 153
  Humanised

SEQ ID NO: 155 - protein, 571 aa, Artificial Sequence
  Humanised
QVQLVQSGAEVKKPGASVKVSCKASGYTFIDYEIHWVRQAPGQGLEWMGAIDPETGGTAYNQKFKGRVTMTTDTSTSTAYMELRSLRSDDTAVYYCTRILLYYYPMDYWGQGTLVTVSSASTKGPSVFPLAPSSKSTSGGTAALGCLVKDYFPEPVTVSWNSGALTSGVHTFPAVLQSSGLYSLSSVVTVPSSSLGTQTYICNVNHKPSNTKVDKKVEPKSCDKTHTCPPCPAPELLGGPSVFLFPPKPKDTLMISRTPEVTCVVVDVSHEDPEVKFNWYVDGVEVHNAKTKPREEQYNSTYRVVSVLTVLHQDWLNGKEYKCKVSNKALPAPIEKTISKAKGQPREPQVYTLPPSRDELTKNQVSLTCLVKGFYPSDIAVEWESNGQPENNYKTTPPVLDSDGSFFLYSKLTVDKSRWQQGNVFSCSVMHEALHNHYTQKSLSLSPGKTVAAPSEVQLLESGGGLVQPGGSLRLSCAASGFTFRNFGMGWVRQAPGKGLEWVSWIISSGTETYYADSVKGRFTISRDNSKNTLYLQMNSLRAEDTAVYYCAKSLGRFDYWGQGTLVTVSS

SEQ ID NO: 156 - protein, 214 aa, Artificial Sequence
  Humanised
EIVLTQSPATLSLSPGERATLSCRASQNISDYLHWYQQKPGQAPRLLIYYASQSISGIPARFSGSGSGTDFTLTISSLEPEDFAVYYCQNGHSFPLTFGGGTKVEIKRTVAAPSVFIFPPSDEQLKSGTASVVCLLNNFYPREAKVQWKVDNALQSGNSQESVTEQDSKDSTYSLSSTLTLSKADYEKHKVYACEVTHQGLSSPVTKSFNRGEC

SEQ ID NO: 157 - protein, 575 aa, Artificial Sequence
  Humanised
QVTLRESGPALVKPTQTLTLTCTFSGFSLSTSGMGVSWIRQPPGKGLEWLAHIYWDDDKRYNPSLKSRLTISKDTSRNQVVLTMTNMDPVDTATYYCARRETVFYWYFDVWGRGTLVTVSSASTKGPSVFPLAPSSKSTSGGTAALGCLVKDYFPEPVTVSWNSGALTSGVHTFPAVLQSSGLYSLSSVVTVPSSSLGTQTYICNVNHKPSNTKVDKKVEPKSCDKTHTCPPCPAPELLGGPSVFLFPPKPKDTLMISRTPEVTCVVVDVSHEDPEVKFNWYVDGVEVHNAKTKPREEQYNSTYRVVSVLTVLHQDWLNGKEYKCKVSNKALPAPIEKTISKAKGQPREPQVYTLPPSRDELTKNQVSLTCLVKGFYPSDIAVEWESNGQPENNYKTTPPVLDSDGSFFLYSKLTVDKSRWQQGNVFSCSVMHEALHNHYTQKSLSLSPGKTVAAPSGVQLLESGGGLVQPGGSLRLSCAASGFVFPWYDMGWVRQAPGKGLEWVSSIDWKGGKTYYADSVKGRFTISRDNSKNTLYLQMNSLRAEDTAVYYCATAEDEPGYDYWGQGTLVTVSS

SEQ ID NO: 158 - protein, 569 aa, Artificial Sequence
  Humanised
QVTLRESGPALVKPTQTLTLTCTFSGFSLSTSGMGVSWIRQPPGKGLEWLAHIYWDDDKRYNPSLKSRLTISKDTSRNQVVLTMTNMDPVDTATYYCARRETVFYWYFDVWGRGTLVTVSSASTKGPSVFPLAPSSKSTSGGTAALGCLVKDYFPEPVTVSWNSGALTSGVHTFPAVLQSSGLYSLSSVVTVPSSSLGTQTYICNVNHKPSNTKVDKKVEPKSCDKTHTCPPCPAPELLGGPSVFLFPPKPKDTLMISRTPEVTCVVVDVSHEDPEVKFNWYVDGVEVHNAKTKPREEQYNSTYRVVSVLTVLHQDWLNGKEYKCKVSNKALPAPIEKTISKAKGQPREPQVYTLPPSRDELTKNQVSLTCLVKGFYPSDIAVEWESNGQPENNYKTTPPVLDSDGSFFLYSKLTVDKSRWQQGNVFSCSVMHEALHNHYTQKSLSLSPGKGVQLLESGGGLVQPGGSLRLSCAASGFVFPWYDMGWVRQAPGKGLEWVSSIDWKGGKTYYADSVKGRFTISRDNSKNTLYLQMNSLRAEDTAVYYCATAEDEPGYDYWGQGTLVTVSS

SEQ ID NO: 159 - protein, 575 aa, Artificial Sequence
  Humanised
QVTLRESGPALVKPTQTLTLTCTFSGFSLSTSGMGVSWIRQPPGKGLEWLAHIYWDDDKRYNPSLKSRLTISKDTSRNQVVLTMTNMDPVDTATYYCARRETVFYWYFDVWGRGTLVTVSSASTKGPSVFPLAPSSKSTSGGTAALGCLVKDYFPEPVTVSWNSGALTSGVHTFPAVLQSSGLYSLSSVVTVPSSSLGTQTYICNVNHKPSNTKVDKKVEPKSCDKTHTCPPCPAPELLGGPSVFLFPPKPKDTLMISRTPEVTCVVVDVSHEDPEVKFNWYVDGVEVHNAKTKPREEQYNSTYRVVSVLTVLHQDWLNGKEYKCKVSNKALPAPIEKTISKAKGQPREPQVYTLPPSRDELTKNQVSLTCLVKGFYPSDIAVEWESNGQPENNYKTTPPVLDSDGSFFLYSKLTVDKSRWQQGNVFSCSVMHEALHNHYTQKSLSLSPGKTVAAPSGVQLLESGGGLVQPGGSLRLSCAASGFVFAWYDMGWVRQAPGKGLEWVSSIDWHGEVTYYADSVKGRFTISRDNSKNTLYLQMNSLRAEDTAVYYCATAEDEPGYDYWGQGTLVTVSS

SEQ ID NO: 160 - protein, 569 aa, Artificial Sequence
  Humanised
QVTLRESGPALVKPTQTLTLTCTFSGFSLSTSGMGVSWIRQPPGKGLEWLAHIYWDDDKRYNPSLKSRLTISKDTSRNQVVLTMTNMDPVDTATYYCARRETVFYWYFDVWGRGTLVTVSSASTKGPSVFPLAPSSKSTSGGTAALGCLVKDYFPEPVTVSWNSGALTSGVHTFPAVLQSSGLYSLSSVVTVPSSSLGTQTYICNVNHKPSNTKVDKKVEPKSCDKTHTCPPCPAPELLGGPSVFLFPPKPKDTLMISRTPEVTCVVVDVSHEDPEVKFNWYVDGVEVHNAKTKPREEQYNSTYRVVSVLTVLHQDWLNGKEYKCKVSNKALPAPIEKTISKAKGQPREPQVYTLPPSRDELTKNQVSLTCLVKGFYPSDIAVEWESNGQPENNYKTTPPVLDSDGSFFLYSKLTVDKSRWQQGNVFSCSVMHEALHNHYTQKSLSLSPGKGVQLLESGGGLVQPGGSLRLSCAASGFVFAWYDMGWVRQAPGKGLEWVSSIDWHGEVTYYADSVKGRFTISRDNSKNTLYLQMNSLRAEDTAVYYCATAEDEPGYDYWGQGTLVTVSS

SEQ ID NO: 161 - protein, 449 aa, Artificial Sequence
  Humanised
QVQLVQSGAEVKKPGASVKVSCKASGYTFIDYEIHWVRQAPGQGLEWMGAIDPETGGTAYNQKFKGRVTMTTDTSTSTAYMELRSLRSDDTAVYYCTRILLYYYPMDYWGQGTLVTVSSASTKGPSVFPLAPSSKSTSGGTAALGCLVKDYFPEPVTVSWNSGALTSGVHTFPAVLQSSGLYSLSSVVTVPSSSLGTQTYICNVNHKPSNTKVDKKVEPKSCDKTHTCPPCPAPELLGGPSVFLFPPKPKDTLMISRTPEVTCVVVDVSHEDPEVKFNWYVDGVEVHNAKTKPREEQYNSTYRVVSVLTVLHQDWLNGKEYKCKVSNKALPAPIEKTISKAKGQPREPQVYTLPPSRDELTKNQVSLTCLVKGFYPSDIAVEWESNGQPENNYKTTPPVLDSDGSFFLYSKLTVDKSRWQQGNVFSCSVMHEALHNHYTQKSLSLSPGK

SEQ ID NO: 162 - DNA, 1707 bp, Artificial Sequence
  Humanised
gaggtgcagctgttggagtctgggggaggcttggtacagcctggggggtccctgcgtctctcctgtgcagcctccggattcacctttggggcttatccgatgatgtgggtccgccaggctccagggaagggtctagagtgggtctcagagatttcgccttcgggttcttatacatactacgcagactccgtgaagggccggttcaccatctcccgcgacaattccaagaacacgctgtatctgcaaatgaacagcctgcgtgccgaggacaccgcggtatattactgtgcgaaagatcctcggaagtttgactactggggtcagggaaccctggtcaccgtctcgagcgctagcaccaagggccccagcgaggtgcagctgttggagtctgggggaggcttggtacagcctggggggtccctgcgtctctcctgtgcagcctccggattcacctttagcagctatgccatgagctgggtccgccaggctccagggaagggtctagagtgggtctcagctattagtggtagtggtggtagcacatactacgcagactccgtgaagggccggttcaccatctcccgcgacaattccaagaacacgctgtatctgcaaatgaacagcctgcgtgccgaggacaccgcggtatattactgtgcgaaaagttatggtgcttttgactactggggccagggaaccctggtcaccgtctcgagcgctagcaccaagggccccagcgtgttccccctggcccccagcagcaagagcaccagcggcggcacagccgccctgggctgcctggtgaaggactacttccccgagcctgtgaccgtgtcctggaatagcggagccctgacctccggcgtgcacaccttccccgccgtgctgcagagcagcggcctgtactccctgagcagcgtggtgaccgtgcccagcagcagcctgggcacccagacctacatctgcaacgtgaaccacaagcccagcaacaccaaagtggacaagaaagtggagcccaagagctgcgataagacccacacctgccccccctgccctgcccccgagctgctgggcggacctagcgtgttcctgttcccccccaagcctaaggacaccctgatgatcagcaggacccccgaagtgacctgcgtggtggtggatgtgagccacgaggaccctgaagtgaagttcaactggtacgtggacggcgtggaagtgcacaacgccaagaccaagcccagagaggagcagtacaacagcacctaccgcgtggtgtctgtgctgaccgtgctgcaccaggattggctgaacggcaaggagtacaagtgcaaagtgagcaacaaggccctgcctgcccctatcgagaaaaccatcagcaaggccaagggccagcctagagagccccaggtctacaccctgcctccctccagagatgagctgaccaagaaccaggtgtccctgacctgtctggtgaagggcttctaccccagcgacatcgccgtggagtgggagagcaacggccagcccgagaacaactacaagaccaccccccctgtgctggacagcgatggcagcttcttcctgtactccaagctgaccgtggacaagagcagatggcagcagggcaacgtgttcagctgcagcgtgatgcacgaggccctgcacaatcactacacccagaagagtctgagcctgtcccctggcaag

SEQ ID NO: 163 - protein, 569 aa, Artificial Sequence
  Humanised
EVQLLESGGGLVQPGGSLRLSCAASGFTFGAYPMMWVRQAPGKGLEWVSEISPSGSYTYYADSVKGRFTISRDNSKNTLYLQMNSLRAEDTAVYYCAKDPRKFDYWGQGTLVTVSSASTKGPSEVQLLESGGGLVQPGGSLRLSCAASGFTFSSYAMSWVRQAPGKGLEWVSAISGSGGSTYYADSVKGRFTISRDNSKNTLYLQMNSLRAEDTAVYYCAKSYGAFDYWGQGTLVTVSSASTKGPSVFPLAPSSKSTSGGTAALGCLVKDYFPEPVTVSWNSGALTSGVHTFPAVLQSSGLYSLSSVVTVPSSSLGTQTYICNVNHKPSNTKVDKKVEPKSCDKTHTCPPCPAPELLGGPSVFLFPPKPKDTLMISRTPEVTCVVVDVSHEDPEVKFNWYVDGVEVHNAKTKPREEQYNSTYRVVSVLTVLHQDWLNGKEYKCKVSNKALPAPIEKTISKAKGQPREPQVYTLPPSRDELTKNQVSLTCLVKGFYPSDIAVEWESNGQPENNYKTTPPVLDSDGSFFLYSKLTVDKSRWQQGNVFSCSVMHEALHNHYTQKSLSLSPGK

SEQ ID NO: 164 - DNA, 1704 bp, Artificial Sequence
  Humanised
caggtgcagctgaagcagagcggccctggcctggtgcagccctctcagagcctgagcatcacctgtaccgtgagcggcttcagcctgaccaattacggcgtgcattgggtgcggcagtctccaggcaagggcctggaatggctgggagtgatctggtccggcggcaacaccgactacaacacccccttcaccagcagactgagcatcaacaaggacaacagcaagagccaggtgttcttcaagatgaacagcctgcagagcaacgacaccgccatctactattgtgccagggccctgacctactacgactacgagttcgcctactggggccagggcaccctggtgaccgtgagcgccgctagcaccaagggccccagcgtgttccccctggcccccagcagcaagagcaccagcggcggcacagccgccctgggctgcctggtgaaggactacttccccgagcctgtgaccgtgtcctggaatagcggagccctgacctccggcgtgcacaccttccccgccgtgctgcagagcagcggcctgtactccctgagcagcgtggtgaccgtgcccagcagcagcctgggcacccagacctacatctgcaacgtgaaccacaagcccagcaacaccaaagtggacaagaaagtggagcccaagagctgcgataagacccacacctgccccccctgccctgcccccgagctgctgggcggacctagcgtgttcctgttcccccccaagcctaaggacaccctgatgatcagcaggacccccgaagtgacctgcgtggtggtggatgtgagccacgaggaccctgaagtgaagttcaactggtacgtggacggcgtggaagtgcacaacgccaagaccaagcccagagaggagcagtacaacagcacctaccgcgtggtgtctgtgctgaccgtgctgcaccaggattggctgaacggcaaggagtacaagtgcaaagtgagcaacaaggccctgcctgcccctatcgagaaaaccatcagcaaggccaagggccagcctagagagccccaggtctacaccctgcctccctccagagatgagctgaccaagaaccaggtgtccctgacctgtctggtgaagggcttctaccccagcgacatcgccgtggagtgggagagcaacggccagcccgagaacaactacaagaccaccccccctgtgctggacagcgatggcagcttcttcctgtactccaagctgaccgtggacaagagcagatggcagcagggcaacgtgttcagctgcagcgtgatgcacgaggccctgcacaatcactacacccagaagagtctgagcctgtcccctggcaagtcgaccggtgaggtgcagctgttggtgtctgggggaggcttggtacagcctggggggtccctgcgtctctcctgtgcagcctccggattcacctttaaggcttatccgatgatgtgggtccgccaggctccagggaagggtctagagtgggtttcagagatttcgccttcgggttcttatacatactacgcagactccgtgaagggccggttcaccatctcccgcgacaattccaagaacacgctgtatctgcaaatgaacagcctgcgtgccgaggacaccgcggtatattactgtgcgaaagatcctcggaagttagactactggggtcagggaaccctggtcaccgtctcgagc

SEQ ID NO: 165 - protein, 568 aa, Artificial Sequence
  Humanised
QVQLKQSGPGLVQPSQSLSITCTVSGFSLTNYGVHWVRQSPGKGLEWLGVIWSGGNTDYNTPFTSRLSINKDNSKSQVFFKMNSLQSNDTAIYYCARALTYYDYEFAYWGQGTLVTVSAASTKGPSVFPLAPSSKSTSGGTAALGCLVKDYFPEPVTVSWNSGALTSGVHTFPAVLQSSGLYSLSSVVTVPSSSLGTQTYICNVNHKPSNTKVDKKVEPKSCDKTHTCPPCPAPELLGGPSVFLFPPKPKDTLMISRTPEVTCVVVDVSHEDPEVKFNWYVDGVEVHNAKTKPREEQYNSTYRVVSVLTVLHQDWLNGKEYKCKVSNKALPAPIEKTISKAKGQPREPQVYTLPPSRDELTKNQVSLTCLVKGFYPSDIAVEWESNGQPENNYKTTPPVLDSDGSFFLYSKLTVDKSRWQQGNVFSCSVMHEALHNHYTQKSLSLSPGKSTGEVQLLVSGGGLVQPGGSLRLSCAASGFTFKAYPMMWVRQAPGKGLEWVSEISPSGSYTYYADSVKGRFTISRDNSKNTLYLQMNSLRAEDTAVYYCAKDPRKLDYWGQGTLVTVSS

SEQ ID NO: 166 - protein, 451 aa, Artificial Sequence
  Humanised
QVTLRESGPALVKPTQTLTLTCTFSGFSLSTSGMGVSWIRQPPGKGLEWLAHIYWDDDKRYNPSLKSRLTISKDTSRNQVVLTMTNMDPVDTATYYCARRETVFYWYFDVWGRGTPVTVSSASTKGPSVFPLAPSSKSTSGGTAALGCLVKDYFPEPVTVSWNSGALTSGVHTFPAVLQSSGLYSLSSVVTVPSSSLGTQTYICNVNHKPSNTKVDKRVEPKSCDKTHTCPPCPAPELLGGPSVFLFPPKPKDTLMISRTPEVTCVVVDVSHEDPEVKFNWYVDGVEVHNAKTKPREEQYNSTYRVVSVLTVLHQDWLNGKEYKCKVSNKALPAPIEKTISKAKGQPREPQVYTLPPSREEMTKNQVSLTCLVKGFYPSDIAVEWESNGQPENNYKTTPPVLDSDGSFFLYSKLTVDKSRWQQGNVFSCSVMHEALHNHYTQKSLSLSPGK

SEQ ID NO: 167 - DNA, 1737 bp, Artificial Sequence
  Humanised
caggtgcagctcgtgcagagcggcgccgaagtgaaaaagcccggcagcagcgtgaaggtgagctgcaaggcctccggcttctacatcaaggacacctacatgcactgggtcaggcaggctcctggccagggcctggagtggatgggcactatcgaccccgccaacggcaacaccaagtacgtgcccaagttccagggcagggtgaccatcaccgccgatgagagcaccagcaccgcctacatggaactgagcagcctgaggtctgaggacaccgccgtgtactattgcgccaggagcatctacgacgactaccactacgacgactactacgccatggactactggggacagggcacactagtgaccgtgtccagcgccagcaccaagggccccagcgtgttccccctggcccccagcagcaagagcaccagcggcggcacagccgccctgggctgcctggtgaaggactacttccccgaaccggtgaccgtgtcctggaacagcggagccctgaccagcggcgtgcacaccttccccgccgtgctgcagagcagcggcctgtacagcctgagcagcgtggtgaccgtgcccagcagcagcctgggcacccagacctacatctgtaacgtgaaccacaagcccagcaacaccaaggtggacaagaaggtggagcccaagagctgtgacaagacccacacctgccccccctgccctgcccccgagctgctgggaggccccagcgtgttcctgttcccccccaagcctaaggacaccctgatgatcagcagaacccccgaggtgacctgtgtggtggtggatgtgagccacgaggaccctgaggtgaagttcaactggtacgtggacggcgtggaggtgcacaatgccaagaccaagcccagggaggagcagtacaacagcacctaccgggtggtgtccgtgctgaccgtgctgcaccaggattggctgaacggcaaggagtacaagtgtaaggtgtccaacaaggccctgcctgcccctatcgagaaaaccatcagcaaggccaagggccagcccagagagccccaggtgtacaccctgccccctagcagagatgagctgaccaagaaccaggtgtccctgacctgcctggtgaagggcttctaccccagcgacatcgccgtggagtgggagagcaacggccagcccgagaacaactacaagaccaccccccctgtgctggacagcgatggcagcttcttcctgtacagcaagctgaccgtggacaagagcagatggcagcagggcaacgtgttcagctgctccgtgatgcacgaggccctgcacaatcactacacccagaagagcctgagcctgtcccctggcaagaccgtggccgccccctcgggatccgaagtgcagctcctggagagcggcggcggcctggtgcagcccggcggcagcctgaggctgagctgcgccgctagcggcttcaccttcaggaacttcggcatgggctgggtcaggcaggcccccggcaagggcctggagtgggtcagctggatcatcagctccggcaccgagacctactacgccgacagcgtgaagggcaggttcaccatcagccgcgacaacagcaagaacaccctgtacctgcagatgaacagcctgagggccgaggacaccgccgtctactactgcgccaagagcctgggcaggttcgactactggggacaggggaccctggtgactgtgagcagc

SEQ ID NO: 168 - DNA, 1710 bp, Artificial Sequence
  Humanised
gaggtgcagctggtggagtctggcggcggactggtgcagcccggcagaagcctgagactgagctgtgccgccagcggcttcaccttcgacgactacgccatgcactgggtgaggcaggcccctggcaagggcctggagtgggtgtccgccatcacctggaatagcggccacatcgactacgccgacagcgtggagggcagattcaccatcagccgggacaacgccaagaacagcctgtacctgcagatgaacagcctgagagccgaggacaccgccgtgtactactgtgccaaggtgtcctacctgagcaccgccagcagcctggactactggggccagggcaccctggtgacagtctcgagcgctagcaccaagggccccagcgtgttccccctggcccccagcagcaagagcaccagcggcggcacagccgccctgggctgcctggtgaaggactacttccccgagcctgtgaccgtgtcctggaatagcggagccctgacctccggcgtgcacaccttccccgccgtgctgcagagcagcggcctgtactccctgagcagcgtggtgaccgtgcccagcagcagcctgggcacccagacctacatctgcaacgtgaaccacaagcccagcaacaccaaagtggacaagaaagtggagcccaagagctgcgataagacccacacctgccccccctgccctgcccccgagctgctgggcggacctagcgtgttcctgttcccccccaagcctaaggacaccctgatgatcagcaggacccccgaagtgacctgcgtggtggtggatgtgagccacgaggaccctgaagtgaagttcaactggtacgtggacggcgtggaagtgcacaacgccaagaccaagcccagagaggagcagtacaacagcacctaccgcgtggtgtctgtgctgaccgtgctgcaccaggattggctgaacggcaaggagtacaagtgcaaagtgagcaacaaggccctgcctgcccctatcgagaaaaccatcagcaaggccaagggccagcctagagagccccaggtctacaccctgcctccctccagagatgagctgaccaagaaccaggtgtccctgacctgtctggtgaagggcttctaccccagcgacatcgccgtggagtgggagagcaacggccagcccgagaacaactacaagaccaccccccctgtgctggacagcgatggcagcttcttcctgtactccaagctgaccgtggacaagagcagatggcagcagggcaacgtgttcagctgcagcgtgatgcacgaggccctgcacaatcactacacccagaagagtctgagcctgtcccctggcaagtcgaccggtgaggtgcagctgttggtgtctgggggaggcttggtacagcctggggggtccctgcgtctctcctgtgcagcctccggattcacctttaaggcttatccgatgatgtgggtccgccaggctccagggaagggtctagagtgggtttcagagatttcgccttcgggttcttatacatactacgcagactccgtgaagggccggttcaccatctcccgcgacaattccaagaacacgctgtatctgcaaatgaacagcctgcgtgccgaggacaccgcggtatattactgtgcgaaagatcctcggaagttagactactggggtcagggaaccctggtcaccgtctcgagc

SEQ ID NO: 169 - DNA, 642 bp, Artificial Sequence
  Humanised
gatatccagatgacccagagccccagcagcctgagcgcctctgtgggcgatagagtgaccatcacctgccgggccagccagggcatcagaaactacctggcctggtatcagcagaagcctggcaaggcccctaagctgctgatctacgccgccagcaccctgcagagcggcgtgcccagcagattcagcggcagcggctccggcaccgacttcaccctgaccatcagcagcctgcagcccgaggacgtggccacctactactgccagcggtacaacagagccccttacaccttcggccagggcaccaaggtggagatcaagcgtacggtggccgcccccagcgtgttcatcttcccccccagcgatgagcagctcaagagcggcaccgccagcgtggtgtgtctgctgaacaacttctacccccgggaggccaaagtgcagtggaaagtggacaacgccctgcagagcggcaacagccaggagagcgtgaccgagcaggacagcaaggactccacctacagcctgagcagcaccctgaccctgagcaaggccgactacgagaagcacaaagtgtacgcctgcgaagtgacccaccagggcctgtccagccccgtgaccaagagcttcaaccggggcgagtgc

SEQ ID NO: 170 - DNA, 1686 bp, Artificial Sequence
  Humanised
gaggtgcagctggtggagtctggcggcggactggtgcagcccggcagaagcctgagactgagctgtgccgccagcggcttcaccttcgacgactacgccatgcactgggtgaggcaggcccctggcaagggcctggagtgggtgtccgccatcacctggaatagcggccacatcgactacgccgacagcgtggagggcagattcaccatcagccgggacaacgccaagaacagcctgtacctgcagatgaacagcctgagagccgaggacaccgccgtgtactactgtgccaaggtgtcctacctgagcaccgccagcagcctggactactggggccagggcaccctggtgacagtctcgagcgctagcaccaagggccccagcgtgttccccctggcccccagcagcaagagcaccagcggcggcacagccgccctgggctgcctggtgaaggactacttccccgagcctgtgaccgtgtcctggaatagcggagccctgacctccggcgtgcacaccttccccgccgtgctgcagagcagcggcctgtactccctgagcagcgtggtgaccgtgcccagcagcagcctgggcacccagacctacatctgcaacgtgaaccacaagcccagcaacaccaaagtggacaagaaagtggagcccaagagctgcgataagacccacacctgccccccctgccctgcccccgagctgctgggcggacctagcgtgttcctgttcccccccaagcctaaggacaccctgatgatcagcaggacccccgaagtgacctgcgtggtggtggatgtgagccacgaggaccctgaagtgaagttcaactggtacgtggacggcgtggaagtgcacaacgccaagaccaagcccagagaggagcagtacaacagcacctaccgcgtggtgtctgtgctgaccgtgctgcaccaggattggctgaacggcaaggagtacaagtgcaaagtgagcaacaaggccctgcctgcccctatcgagaaaaccatcagcaaggccaagggccagcctagagagccccaggtctacaccctgcctccctccagagatgagctgaccaagaaccaggtgtccctgacctgtctggtgaagggcttctaccccagcgacatcgccgtggagtgggagagcaacggccagcccgagaacaactacaagaccaccccccctgtgctggacagcgatggcagcttcttcctgtactccaagctgaccgtggacaagagcagatggcagcagggcaacgtgttcagctgcagcgtgatgcacgaggccctgcacaatcactacacccagaagagtctgagcctgtcccctggcaagtcgaccggtgacatccagatgacccagagcccttcaagcctgagcgccagcgtgggcgacagagtgaccatcacctgccgggccagccagtggatcggcaacctgctggactggtatcagcagaagcccggcaaggcccccaagctgctgatctactacgccagcttcctgcagagcggcgtgcccagccggtttagcggcagcggctacggcaccgacttcaccctgaccatcagcagcctgcagcccgaggacttcgccacctactactgccagcaggccaaccctgcccccctgaccttcggccagggtaccaaggtggaaatcaaacgg

SEQ ID NO: 171 - DNA, 984 bp, Artificial Sequence
  Humanised
gacatccagatgacccagtctccatcctccctgtctgcatctgtaggagaccgtgtcaccatcacttgccgggcaagtcaggatatttacctgaatttagactggtatcagcagaaaccagggaaagcccctaagctcctgatcaattttggttccgagttgcaaagtggtgtcccatcacgtttcagtggcagtggatatgggacagatttcactctcaccatcagcagtctgcaacctgaagatttcgctacgtactactgtcaaccgtctttttacttcccttatacgttcggccaagggaccaaggtggaaatcaaacgtacggtggccgcccccagcgacatccagatgacccagtctccatcctccctgtctgcatctgtaggagaccgtgtcaccatcacttgccgggcaagtcagagcattagcagctatttaaattggtaccagcagaaaccagggaaagcccctaagctcctgatctatgctgcatccagtttgcaaagtggggtcccatcacgtttcagtggcagtggatctgggacagatttcactctcaccatcagcagtctgcaacctgaagattttgctacgtactactgtcaacagagttacagtacccctaatacgttcggccaagggaccaaggtggaaatcaaacgtacggtggccgcccccagcgtgttcatcttcccccccagcgatgagcagctcaagagcggcaccgccagcgtggtgtgtctgctgaacaacttctacccccgggaggccaaagtgcagtggaaagtggacaacgccctgcagagcggcaacagccaggagagcgtgaccgagcaggacagcaaggactccacctacagcctgagcagcaccctgaccctgagcaaggccgactacgagaagcacaaagtgtacgcctgcgaagtgacccaccagggcctgtccagccccgtgaccaagagcttcaaccggggcgagtgc

SEQ ID NO: 172 - DNA, 1707 bp, Artificial Sequence
  Humanised
gaggtgcagctgttggtgtctgggggaggcttggtacagcctggggggtccctgcgtctctcctgtgcagcctccggattcacctttaaggcttatccgatgatgtgggtccgccaggctccagggaagggtctagagtgggtttcagagatttcgccttcgggttcttatacatactacgcagactccgtgaagggccggttcaccatctcccgcgacaattccaagaacacgctgtatctgcaaatgaacagcctgcgtgccgaggacaccgcggtatattactgtgcgaaagatcctcggaagttagactactggggtcagggaaccctggtcaccgtctcgagcgctagcaccaagggccccagcgaggtgcagctgttggagtctgggggaggcttggtacagcctggggggtccctgcgtctctcctgtgcagcctccggattcacctttagcagctatgccatgagctgggtccgccaggctccagggaagggtctagagtgggtctcagctattagtggtagtggtggtagcacatactacgcagactccgtgaagggccggttcaccatctcccgcgacaattccaagaacacgctgtatctgcaaatgaacagcctgcgtgccgaggacaccgcggtatattactgtgcgaaaagttatggtgcttttgactactggggccagggaaccctggtcaccgtctcgagcgctagcaccaagggccccagcgtgttccccctggcccccagcagcaagagcaccagcggcggcacagccgccctgggctgcctggtgaaggactacttccccgagcctgtgaccgtgtcctggaatagcggagccctgacctccggcgtgcacaccttccccgccgtgctgcagagcagcggcctgtactccctgagcagcgtggtgaccgtgcccagcagcagcctgggcacccagacctacatctgcaacgtgaaccacaagcccagcaacaccaaagtggacaagaaagtggagcccaagagctgcgataagacccacacctgccccccctgccctgcccccgagctgctgggcggacctagcgtgttcctgttcccccccaagcctaaggacaccctgatgatcagcaggacccccgaagtgacctgcgtggtggtggatgtgagccacgaggaccctgaagtgaagttcaactggtacgtggacggcgtggaagtgcacaacgccaagaccaagcccagagaggagcagtacaacagcacctaccgcgtggtgtctgtgctgaccgtgctgcaccaggattggctgaacggcaaggagtacaagtgcaaagtgagcaacaaggccctgcctgcccctatcgagaaaaccatcagcaaggccaagggccagcctagagagccccaggtctacaccctgcctccctccagagatgagctgaccaagaaccaggtgtccctgacctgtctggtgaagggcttctaccccagcgacatcgccgtggagtgggagagcaacggccagcccgagaacaactacaagaccaccccccctgtgctggacagcgatggcagcttcttcctgtactccaagctgaccgtggacaagagcagatggcagcagggcaacgtgttcagctgcagcgtgatgcacgaggccctgcacaatcactacacccagaagagtctgagcctgtcccctggcaag

SEQ ID NO: 173 - DNA, 1695 bp, Artificial Sequence
  Humanised
caggtgcagctgaagcagagcggccctggcctggtgcagccctctcagagcctgagcatcacctgtaccgtgagcggcttcagcctgaccaattacggcgtgcattgggtgcggcagtctccaggcaagggcctggaatggctgggagtgatctggtccggcggcaacaccgactacaacacccccttcaccagcagactgagcatcaacaaggacaacagcaagagccaggtgttcttcaagatgaacagcctgcagagcaacgacaccgccatctactattgtgccagggccctgacctactacgactacgagttcgcctactggggccagggcaccctggtgaccgtgagcgccgctagcaccaagggccccagcgtgttccccctggcccccagcagcaagagcaccagcggcggcacagccgccctgggctgcctggtgaaggactacttccccgagcctgtgaccgtgtcctggaatagcggagccctgacctccggcgtgcacaccttccccgccgtgctgcagagcagcggcctgtactccctgagcagcgtggtgaccgtgcccagcagcagcctgggcacccagacctacatctgcaacgtgaaccacaagcccagcaacaccaaagtggacaagaaagtggagcccaagagctgcgataagacccacacctgccccccctgccctgcccccgagctgctgggcggacctagcgtgttcctgttcccccccaagcctaaggacaccctgatgatcagcaggacccccgaagtgacctgcgtggtggtggatgtgagccacgaggaccctgaagtgaagttcaactggtacgtggacggcgtggaagtgcacaacgccaagaccaagcccagagaggagcagtacaacagcacctaccgcgtggtgtctgtgctgaccgtgctgcaccaggattggctgaacggcaaggagtacaagtgcaaagtgagcaacaaggccctgcctgcccctatcgagaaaaccatcagcaaggccaagggccagcctagagagccccaggtctacaccctgcctccctccagagatgagctgaccaagaaccaggtgtccctgacctgtctggtgaagggcttctaccccagcgacatcgccgtggagtgggagagcaacggccagcccgagaacaactacaagaccaccccccctgtgctggacagcgatggcagcttcttcctgtactccaagctgaccgtggacaagagcagatggcagcagggcaacgtgttcagctgcagcgtgatgcacgaggccctgcacaatcactacacccagaagagtctgagcctgtcccctggcaaggaggtgcagctgttggtgtctgggggaggcttggtacagcctggggggtccctgcgtctctcctgtgcagcctccggattcacctttaaggcttatccgatgatgtgggtccgccaggctccagggaagggtctagagtgggtttcagagatttcgccttcgggttcttatacatactacgcagactccgtgaagggccggttcaccatctcccgcgacaattccaagaacacgctgtatctgcaaatgaacagcctgcgtgccgaggacaccgcggtatattactgtgcgaaagatcctcggaagttagactactggggtcagggaaccctggtcaccgtctcgagc

SEQ ID NO: 174 - protein, 565 aa, Artificial Sequence
  Humanised
QVQLKQSGPGLVQPSQSLSITCTVSGFSLTNYGVHWVRQSPGKGLEWLGVIWSGGNTDYNTPFTSRLSINKDNSKSQVFFKMNSLQSNDTAIYYCARALTYYDYEFAYWGQGTLVTVSAASTKGPSVFPLAPSSKSTSGGTAALGCLVKDYFPEPVTVSWNSGALTSGVHTFPAVLQSSGLYSLSSVVTVPSSSLGTQTYICNVNHKPSNTKVDKKVEPKSCDKTHTCPPCPAPELLGGPSVFLFPPKPKDTLMISRTPEVTCVVVDVSHEDPEVKFNWYVDGVEVHNAKTKPREEQYNSTYRVVSVLTVLHQDWLNGKEYKCKVSNKALPAPIEKTISKAKGQPREPQVYTLPPSRDELTKNQVSLTCLVKGFYPSDIAVEWESNGQPENNYKTTPPVLDSDGSFFLYSKLTVDKSRWQQGNVFSCSVMHEALHNHYTQKSLSLSPGKEVQLLVSGGGLVQPGGSLRLSCAASGFTFKAYPMMWVRQAPGKGLEWVSEISPSGSYTYYADSVKGRFTISRDNSKNTLYLQMNSLRAEDTAVYYCAKDPRKLDYWGQGTLVTVSS

SEQ ID NO: 175 - DNA, 1719 bp, Artificial Sequence
  Humanised
caggtgcagctgaagcagagcggccctggcctggtgcagccctctcagagcctgagcatcacctgtaccgtgagcggcttcagcctgaccaattacggcgtgcattgggtgcggcagtctccaggcaagggcctggaatggctgggagtgatctggtccggcggcaacaccgactacaacacccccttcaccagcagactgagcatcaacaaggacaacagcaagagccaggtgttcttcaagatgaacagcctgcagagcaacgacaccgccatctactattgtgccagggccctgacctactacgactacgagttcgcctactggggccagggcaccctggtgaccgtgagcgccgctagcaccaagggccccagcgtgttccccctggcccccagcagcaagagcaccagcggcggcacagccgccctgggctgcctggtgaaggactacttccccgagcctgtgaccgtgtcctggaatagcggagccctgacctccggcgtgcacaccttccccgccgtgctgcagagcagcggcctgtactccctgagcagcgtggtgaccgtgcccagcagcagcctgggcacccagacctacatctgcaacgtgaaccacaagcccagcaacaccaaagtggacaagaaagtggagcccaagagctgcgataagacccacacctgccccccctgccctgcccccgagctgctgggcggacctagcgtgttcctgttcccccccaagcctaaggacaccctgatgatcagcaggacccccgaagtgacctgcgtggtggtggatgtgagccacgaggaccctgaagtgaagttcaactggtacgtggacggcgtggaagtgcacaacgccaagaccaagcccagagaggagcagtacaacagcacctaccgcgtggtgtctgtgctgaccgtgctgcaccaggattggctgaacggcaaggagtacaagtgcaaagtgagcaacaaggccctgcctgcccctatcgagaaaaccatcagcaaggccaagggccagcctagagagccccaggtctacaccctgcctccctccagagatgagctgaccaagaaccaggtgtccctgacctgtctggtgaagggcttctaccccagcgacatcgccgtggagtgggagagcaacggccagcccgagaacaactacaagaccaccccccctgtgctggacagcgatggcagcttcttcctgtactccaagctgaccgtggacaagagcagatggcagcagggcaacgtgttcagctgcagcgtgatgcacgaggccctgcacaatcactacacccagaagagtctgagcctgtcccctggcaagtcgaccggtggtggaggtggatcagaggtgcagctgttggtgtctgggggaggcttggtacagcctggggggtccctgcgtctctcctgtgcagcctccggattcacctttaaggcttatccgatgatgtgggtccgccaggctccagggaagggtctagagtgggtttcagagatttcgccttcgggttcttatacatactacgcagactccgtgaagggccggttcaccatctcccgcgacaattccaagaacacgctgtatctgcaaatgaacagcctgcgtgccgaggacaccgcggtatattactgtgcgaaagatcctcggaagttagactactggggtcagggaaccctggtcaccgtctcgagc

SEQ ID NO: 176 - protein, 573 aa, Artificial Sequence
  Humanised
QVQLKQSGPGLVQPSQSLSITCTVSGFSLTNYGVHWVRQSPGKGLEWLGVIWSGGNTDYNTPFTSRLSINKDNSKSQVFFKMNSLQSNDTAIYYCARALTYYDYEFAYWGQGTLVTVSAASTKGPSVFPLAPSSKSTSGGTAALGCLVKDYFPEPVTVSWNSGALTSGVHTFPAVLQSSGLYSLSSVVTVPSSSLGTQTYICNVNHKPSNTKVDKKVEPKSCDKTHTCPPCPAPELLGGPSVFLFPPKPKDTLMISRTPEVTCVVVDVSHEDPEVKFNWYVDGVEVHNAKTKPREEQYNSTYRVVSVLTVLHQDWLNGKEYKCKVSNKALPAPIEKTISKAKGQPREPQVYTLPPSRDELTKNQVSLTCLVKGFYPSDIAVEWESNGQPENNYKTTPPVLDSDGSFFLYSKLTVDKSRWQQGNVFSCSVMHEALHNHYTQKSLSLSPGKSTGGGGGSEVQLLVSGGGLVQPGGSLRLSCAASGFTFKAYPMMWVRQAPGKGLEWVSEISPSGSYTYYADSVKGRFTISRDNSKNTLYLQMNSLRAEDTAVYYCAKDPRKLDYWGQGTLVTVSS

SEQ ID NO: 177 - DNA, 1734 bp, Artificial Sequence
  Humanised
caggtgcagctgaagcagagcggccctggcctggtgcagccctctcagagcctgagcatcacctgtaccgtgagcggcttcagcctgaccaattacggcgtgcattgggtgcggcagtctccaggcaagggcctggaatggctgggagtgatctggtccggcggcaacaccgactacaacacccccttcaccagcagactgagcatcaacaaggacaacagcaagagccaggtgttcttcaagatgaacagcctgcagagcaacgacaccgccatctactattgtgccagggccctgacctactacgactacgagttcgcctactggggccagggcaccctggtgaccgtgagcgccgctagcaccaagggccccagcgtgttccccctggcccccagcagcaagagcaccagcggcggcacagccgccctgggctgcctggtgaaggactacttccccgagcctgtgaccgtgtcctggaatagcggagccctgacctccggcgtgcacaccttccccgccgtgctgcagagcagcggcctgtactccctgagcagcgtggtgaccgtgcccagcagcagcctgggcacccagacctacatctgcaacgtgaaccacaagcccagcaacaccaaagtggacaagaaagtggagcccaagagctgcgataagacccacacctgccccccctgccctgcccccgagctgctgggcggacctagcgtgttcctgttcccccccaagcctaaggacaccctgatgatcagcaggacccccgaagtgacctgcgtggtggtggatgtgagccacgaggaccctgaagtgaagttcaactggtacgtggacggcgtggaagtgcacaacgccaagaccaagcccagagaggagcagtacaacagcacctaccgcgtggtgtctgtgctgaccgtgctgcaccaggattggctgaacggcaaggagtacaagtgcaaagtgagcaacaaggccctgcctgcccctatcgagaaaaccatcagcaaggccaagggccagcctagagagccccaggtctacaccctgcctccctccagagatgagctgaccaagaaccaggtgtccctgacctgtctggtgaagggcttctaccccagcgacatcgccgtggagtgggagagcaacggccagcccgagaacaactacaagaccaccccccctgtgctggacagcgatggcagcttcttcctgtactccaagctgaccgtggacaagagcagatggcagcagggcaacgtgttcagctgcagcgtgatgcacgaggccctgcacaatcactacacccagaagagtctgagcctgtcccctggcaagtcgaccggtggtggaggtggatcaggtggaggtggatcagaggtgcagctgttggtgtctgggggaggcttggtacagcctggggggtccctgcgtctctcctgtgcagcctccggattcacctttaaggcttatccgatgatgtgggtccgccaggctccagggaagggtctagagtgggtttcagagatttcgccttcgggttcttatacatactacgcagactccgtgaagggccggttcaccatctcccgcgacaattccaagaacacgctgtatctgcaaatgaacagcctgcgtgccgaggacaccgcggtatattactgtgcgaaagatcctcggaagttagactactggggtcagggaaccctggtcaccgtctcgagc

SEQ ID NO: 178 - protein, 578 aa, Artificial Sequence
  Humanised
QVQLKQSGPGLVQPSQSLSITCTVSGFSLTNYGVHWVRQSPGKGLEWLGVIWSGGNTDYNTPFTSRLSINKDNSKSQVFFKMNSLQSNDTAIYYCARALTYYDYEFAYWGQGTLVTVSAASTKGPSVFPLAPSSKSTSGGTAALGCLVKDYFPEPVTVSWNSGALTSGVHTFPAVLQSSGLYSLSSVVTVPSSSLGTQTYICNVNHKPSNTKVDKKVEPKSCDKTHTCPPCPAPELLGGPSVFLFPPKPKDTLMISRTPEVTCVVVDVSHEDPEVKFNWYVDGVEVHNAKTKPREEQYNSTYRVVSVLTVLHQDWLNGKEYKCKVSNKALPAPIEKTISKAKGQPREPQVYTLPPSRDELTKNQVSLTCLVKGFYPSDIAVEWESNGQPENNYKTTPPVLDSDGSFFLYSKLTVDKSRWQQGNVFSCSVMHEALHNHYTQKSLSLSPGKSTGGGGGSGGGGSEVQLLVSGGGLVQPGGSLRLSCAASGFTFKAYPMMWVRQAPGKGLEWVSEISPSGSYTYYADSVKGRFTISRDNSKNTLYLQMNSLRAEDTAVYYCAKDPRKLDYWGQGTLVTVSS

SEQ ID NO: 179 - DNA, 1692 bp, Artificial Sequence
  Humanised
gaggtgcagctggtcgagtctggcggcggactggtgcagcctggcggcagcctgagactgagctgcgccgccagcggctacaccttcaccaactacggcatgaactgggtgcggcaggcccctggcaagggcctggaatgggtgggctggatcaacacctacaccggcgagcccacctacgccgccgacttcaagcggcggttcaccttcagcctggacaccagcaagagcaccgcctacctgcagatgaacagcctgcgggccgaggacaccgccgtgtactactgcgccaagtacccccactactacggcagcagccactggtacttcgactactgggggcagggtaccctggtcaccgtctcgagcgctagcaccaagggccccagcgtgttccccctggcccccagcagcaagagcaccagcggcggcacagccgccctgggctgcctggtgaaggactacttccccgagcctgtgaccgtgtcctggaatagcggagccctgacctccggcgtgcacaccttccccgccgtgctgcagagcagcggcctgtactccctgagcagcgtggtgaccgtgcccagcagcagcctgggcacccagacctacatctgcaacgtgaaccacaagcccagcaacaccaaagtggacaagaaagtggagcccaagagctgcgataagacccacacctgccccccctgccctgcccccgagctgctgggcggacctagcgtgttcctgttcccccccaagcctaaggacaccctgatgatcagcaggacccccgaagtgacctgcgtggtggtggatgtgagccacgaggaccctgaagtgaagttcaactggtacgtggacggcgtggaagtgcacaacgccaagaccaagcccagagaggagcagtacaacagcacctaccgcgtggtgtctgtgctgaccgtgctgcaccaggattggctgaacggcaaggagtacaagtgcaaagtgagcaacaaggccctgcctgcccctatcgagaaaaccatcagcaaggccaagggccagcctagagagccccaggtctacaccctgcctccctccagagatgagctgaccaagaaccaggtgtccctgacctgtctggtgaagggcttctaccccagcgacatcgccgtggagtgggagagcaacggccagcccgagaacaactacaagaccaccccccctgtgctggacagcgatggcagcttcttcctgtactccaagctgaccgtggacaagagcagatggcagcagggcaacgtgttcagctgcagcgtgatgcacgaggccctgcacaatcactacacccagaagagtctgagcctgtcccctggcaagtcgaccggtgacatccagatgacccagagcccttcaagcctgagcgccagcgtgggcgacagagtgaccatcacctgccgggccagccagtggatcggcaacctgctggactggtatcagcagaagcccggcaaggcccccaagctgctgatctactacgccagcttcctgcagagcggcgtgcccagccggtttagcggcagcggctacggcaccgacttcaccctgaccatcagcagcctgcagcccgaggacttcgccacctactactgccagcaggccaaccctgcccccctgaccttcggccagggtaccaaggtggaaatcaaacgg

SEQ ID NO: 180 - protein, 564 aa, Artificial Sequence
  Humanised
EVQLVESGGGLVQPGGSLRLSCAASGYTFTNYGMNWVRQAPGKGLEWVGWINTYTGEPTYAADFKRRFTFSLDTSKSTAYLQMNSLRAEDTAVYYCAKYPHYYGSSHWYFDYWGQGTLVTVSSASTKGPSVFPLAPSSKSTSGGTAALGCLVKDYFPEPVTVSWNSGALTSGVHTFPAVLQSSGLYSLSSVVTVPSSSLGTQTYICNVNHKPSNTKVDKKVEPKSCDKTHTCPPCPAPELLGGPSVFLFPPKPKDTLMISRTPEVTCVVVDVSHEDPEVKFNWYVDGVEVHNAKTKPREEQYNSTYRVVSVLTVLHQDWLNGKEYKCKVSNKALPAPIEKTISKAKGQPREPQVYTLPPSRDELTKNQVSLTCLVKGFYPSDIAVEWESNGQPENNYKTTPPVLDSDGSFFLYSKLTVDKSRWQQGNVFSCSVMHEALHNHYTQKSLSLSPGKSTGDIQMTQSPSSLSASVGDRVTITCRASQWIGNLLDWYQQKPGKAPKLLIYYASFLQSGVPSRFSGSGYGTDFTLTISSLQPEDFATYYCQQANPAPLTFGQGTKVEIKR

SEQ ID NO: 181 - DNA, 642 bp, Artificial Sequence
  Humanised
gacatccagatgacccagagccccagcagcctgagcgccagcgtgggcgacagagtgaccatcacctgcagcgccagccaggacatcagcaactacctgaactggtatcagcagaagcccggcaaggcccccaaggtgctgatctacttcaccagctccctgcacagcggcgtgcccagccggtttagcggcagcggctccggcaccgacttcaccctgaccatcagcagcctgcagcccgaggacttcgccacctactactgccagcagtacagcaccgtgccctggaccttcggccagggtaccaaggtggagatcaagcgtacggtggccgctcccagcgtgttcatcttcccccccagcgacgagcagctgaagagcggcaccgcctccgtggtgtgcctgctgaacaacttctacccccgggaggccaaggtgcagtggaaggtggacaacgccctgcagtccggcaacagccaggaaagcgtcaccgagcaggactccaaggactccacctacagcctgagcagcaccctgaccctgagcaaggccgactacgagaagcacaaggtgtacgcctgcgaagtgacccaccagggcctgtccagccccgtgaccaagagcttcaaccggggcgagtgc

SEQ ID NO: 182 - protein, 214 aa, Artificial Sequence
  Humanised
DIQMTQSPSSLSASVGDRVTITCSASQDISNYLNWYQQKPGKAPKVLIYFTSSLHSGVPSRFSGSGSGTDFTLTISSLQPEDFATYYCQQYSTVPWTFGQGTKVEIKRTVAAPSVFIFPPSDEQLKSGTASVVCLLNNFYPREAKVQWKVDNALQSGNSQESVTEQDSKDSTYSLSSTLTLSKADYEKHKVYACEVTHQGLSSPVTKSFNRGEC

SEQ ID NO: 183 - DNA, 1710 bp, Artificial Sequence
  Humanised
caggtgcagctgaagcagagcggccctggcctggtgcagccctctcagagcctgagcatcacctgtaccgtgagcggcttcagcctgaccaattacggcgtgcattgggtgcggcagtctccaggcaagggcctggaatggctgggagtgatctggtccggcggcaacaccgactacaacacccccttcaccagcagactgagcatcaacaaggacaacagcaagagccaggtgttcttcaagatgaacagcctgcagagcaacgacaccgccatctactattgtgccagggccctgacctactacgactacgagttcgcctactggggccagggcaccctggtgaccgtgagcgccgctagcaccaagggccccagcgtgttccccctggcccccagcagcaagagcaccagcggcggcacagccgccctgggctgcctggtgaaggactacttccccgagcctgtgaccgtgtcctggaatagcggagccctgacctccggcgtgcacaccttccccgccgtgctgcagagcagcggcctgtactccctgagcagcgtggtgaccgtgcccagcagcagcctgggcacccagacctacatctgcaacgtgaaccacaagcccagcaacaccaaagtggacaagaaagtggagcccaagagctgcgataagacccacacctgccccccctgccctgcccccgagctgctgggcggacctagcgtgttcctgttcccccccaagcctaaggacaccctgatgatcagcaggacccccgaagtgacctgcgtggtggtggatgtgagccacgaggaccctgaagtgaagttcaactggtacgtggacggcgtggaagtgcacaacgccaagaccaagcccagagaggagcagtacaacagcacctaccgcgtggtgtctgtgctgaccgtgctgcaccaggattggctgaacggcaaggagtacaagtgcaaagtgagcaacaaggccctgcctgcccctatcgagaaaaccatcagcaaggccaagggccagcctagagagccccaggtctacaccctgcctccctccagagatgagctgaccaagaaccaggtgtccctgacctgtctggtgaagggcttctaccccagcgacatcgccgtggagtgggagagcaacggccagcccgagaacaactacaagaccaccccccctgtgctggacagcgatggcagcttcttcctgtactccaagctgaccgtggacaagagcagatggcagcagggcaacgtgttcagctgcagcgtgatgcacgaggccctgcacaatcactacacccagaagagtctgagcctgtcccctggcaagtcgaccggtggggtgcagctgttggagtctgggggaggcttggtacagcctggggggtccctgcgtctctcctgtgcagcctccggattcaccttcgcttggtatgatatggggtgggtccgccaggctccagggaagggtctagagtgggtctcaagtattgattggcatggtgaggttacatactacgcagactccgtgaagggccggttcaccatctcccgcgacaattccaagaacacgctgtatctgcaaatgaacagcctgcgtgccgaggacaccgcggtatattactgtgcgacagcggaggacgagccggggtatgactactggggccagggaaccctggtcaccgtctcgagc

SEQ ID NO: 184 - protein, 570 aa, Artificial Sequence
  Humanised
QVQLKQSGPGLVQPSQSLSITCTVSGFSLTNYGVHWVRQSPGKGLEWLGVIWSGGNTDYNTPFTSRLSINKDNSKSQVFFKMNSLQSNDTAIYYCARALTYYDYEFAYWGQGTLVTVSAASTKGPSVFPLAPSSKSTSGGTAALGCLVKDYFPEPVTVSWNSGALTSGVHTFPAVLQSSGLYSLSSVVTVPSSSLGTQTYICNVNHKPSNTKVDKKVEPKSCDKTHTCPPCPAPELLGGPSVFLFPPKPKDTLMISRTPEVTCVVVDVSHEDPEVKFNWYVDGVEVHNAKTKPREEQYNSTYRVVSVLTVLHQDWLNGKEYKCKVSNKALPAPIEKTISKAKGQPREPQVYTLPPSRDELTKNQVSLTCLVKGFYPSDIAVEWESNGQPENNYKTTPPVLDSDGSFFLYSKLTVDKSRWQQGNVFSCSVMHEALHNHYTQKSLSLSPGKSTGGVQLLESGGGLVQPGGSLRLSCAASGFTFAWYDMGWVRQAPGKGLEWVSSIDWHGEVTYYADSVKGRFTISRDNSKNTLYLQMNSLRAEDTAVYYCATAEDEPGYDYWGQGTLVTVSS

SEQ ID NO: 185 - protein, 562 aa, Artificial Sequence
  Humanised
EVQLVESGGGLVQPGRSLRLSCAASGFTFDDYAMHWVRQAPGKGLEWVSAITWNSGHIDYADSVEGRFTISRDNAKNSLYLQMNSLRAEDTAVYYCAKVSYLSTASSLDYWGQGTLVTVSSASTKGPSVFPLAPSSKSTSGGTAALGCLVKDYFPEPVTVSWNSGALTSGVHTFPAVLQSSGLYSLSSVVTVPSSSLGTQTYICNVNHKPSNTKVDKKVEPKSCDKTHTCPPCPAPELLGGPSVFLFPPKPKDTLMISRTPEVTCVVVDVSHEDPEVKFNWYVDGVEVHNAKTKPREEQYNSTYRVVSVLTVLHQDWLNGKEYKCKVSNKALPAPIEKTISKAKGQPREPQVYTLPPSRDELTKNQVSLTCLVKGFYPSDIAVEWESNGQPENNYKTTPPVLDSDGSFFLYSKLTVDKSRWQQGNVFSCSVMHEALHNHYTQKSLSLSPGKSTGDIQMTQSPSSLSASVGDRVTITCRASQWIGPELRWYQQKPGKAPKLLIYHTSILQSGVPSRFSGSGSGTDFTLTISSLQPEDFATYYCQQYMFQPMTFGQGTKVEIKR

SEQ ID NO: 186 - protein, 560 aa, Artificial Sequence
  Humanised
QVQLKQSGPGLVQPSQSLSITCTVSGFSLTNYGVHWVRQSPGKGLEWLGVIWSGGNTDYNTPFTSRLSINKDNSKSQVFFKMNSLQSNDTAIYYCARALTYYDYEFAYWGQGTLVTVSAASTKGPSVFPLAPSSKSTSGGTAALGCLVKDYFPEPVTVSWNSGALTSGVHTFPAVLQSSGLYSLSSVVTVPSSSLGTQTYICNVNHKPSNTKVDKKVEPKSCDKTHTCPPCPAPELLGGPSVFLFPPKPKDTLMISRTPEVTCVVVDVSHEDPEVKFNWYVDGVEVHNAKTKPREEQYNSTYRVVSVLTVLHQDWLNGKEYKCKVSNKALPAPIEKTISKAKGQPREPQVYTLPPSRDELTKNQVSLTCLVKGFYPSDIAVEWESNGQPENNYKTTPPVLDSDGSFFLYSKLTVDKSRWQQGNVFSCSVMHEALHNHYTQKSLSLSPGKSTGDIQMTQSPSSLSASVGDRVTITCRASQWIGPELRWYQQKPGKAPKLLIYHTSILQSGVPSRFSGSGSGTDFTLTISSLQPEDFATYYCQQYMFQPMTFGQGTKVEIKR

SEQ ID NO: 187 - DNA, 1002 bp, Artificial Sequence
  Humanised
gacatcctgctgacccagagccccgtgatcctgagcgtgagccctggcgagagagtgagcttcagctgccgggccagccagagcatcggcaccaacatccactggtatcagcagcggaccaacggcagccccaggctgctgatcaagtacgccagcgagtccatcagcggcatccccagccggttcagcggcagcggctccggcaccgacttcaccctgagcatcaacagcgtggagagcgaggatatcgccgactactactgccagcagaacaacaactggcccaccaccttcggagccggcaccaagctggaactgaagcgtacggtggccgcccccagcgtgttcatcttcccccccagcgatgagcagctcaagagcggcaccgccagcgtggtgtgtctgctgaacaacttctacccccgggaggccaaagtgcagtggaaagtggacaacgccctgcagagcggcaacagccaggagagcgtgaccgagcaggacagcaaggactccacctacagcctgagcagcaccctgaccctgagcaaggccgactacgagaagcacaaagtgtacgcctgcgaagtgacccaccagggcctgtccagccccgtgaccaagagcttcaaccggggcgagtgcggatccaccggcgaggtgcagctgttggtgtctgggggaggcttggtacagcctggggggtccctgcgtctctcctgtgcagcctccggattcacctttaaggcttatccgatgatgtgggtccgccaggctccagggaagggtctagagtgggtttcagagatttcgccttcgggttcttatacatactacgcagactccgtgaagggccggttcaccatctcccgcgacaattccaagaacacgctgtatctgcaaatgaacagcctgcgtgccgaggacaccgcggtatattactgtgcgaaagatcctcggaagttagactactggggtcagggaaccctggtcaccgtctcgagc

SEQ ID NO: 188 - protein, 334 aa, Artificial Sequence
  Humanised
DILLTQSPVILSVSPGERVSFSCRASQSIGTNIHWYQQRTNGSPRLLIKYASESISGIPSRFSGSGSGTDFTLSINSVESEDIADYYCQQNNNWPTTFGAGTKLELKRTVAAPSVFIFPPSDEQLKSGTASVVCLLNNFYPREAKVQWKVDNALQSGNSQESVTEQDSKDSTYSLSSTLTLSKADYEKHKVYACEVTHQGLSSPVTKSFNRGECGSTGEVQLLVSGGGLVQPGGSLRLSCAASGFTFKAYPMMWVRQAPGKGLEWVSEISPSGSYTYYADSVKGRFTISRDNSKNTLYLQMNSLRAEDTAVYYCAKDPRKLDYWGQGTLVTVSS

SEQ ID NO: 189 - DNA, 1014 bp, Artificial Sequence
  Humanised
gacatcctgctgacccagagccccgtgatcctgagcgtgagccctggcgagagagtgagcttcagctgccgggccagccagagcatcggcaccaacatccactggtatcagcagcggaccaacggcagccccaggctgctgatcaagtacgccagcgagtccatcagcggcatccccagccggttcagcggcagcggctccggcaccgacttcaccctgagcatcaacagcgtggagagcgaggatatcgccgactactactgccagcagaacaacaactggcccaccaccttcggagccggcaccaagctggaactgaagcgtacggtggccgcccccagcgtgttcatcttcccccccagcgatgagcagctcaagagcggcaccgccagcgtggtgtgtctgctgaacaacttctacccccgggaggccaaagtgcagtggaaagtggacaacgccctgcagagcggcaacagccaggagagcgtgaccgagcaggacagcaaggactccacctacagcctgagcagcaccctgaccctgagcaaggccgactacgagaagcacaaagtgtacgcctgcgaagtgacccaccagggcctgtccagccccgtgaccaagagcttcaaccggggcgagtgcggatccacggtggccgcccccagcgaggtgcagctgttggtgtctgggggaggcttggtacagcctggggggtccctgcgtctctcctgtgcagcctccggattcacctttaaggcttatccgatgatgtgggtccgccaggctccagggaagggtctagagtgggtttcagagatttcgccttcgggttcttatacatactacgcagactccgtgaagggccggttcaccatctcccgcgacaattccaagaacacgctgtatctgcaaatgaacagcctgcgtgccgaggacaccgcggtatattactgtgcgaaagatcctcggaagttagactactggggtcagggaaccctggtcaccgtctcgagc

SEQ ID NO: 190 - protein, 338 aa, Artificial Sequence
  Humanised
DILLTQSPVILSVSPGERVSFSCRASQSIGTNIHWYQQRTNGSPRLLIKYASESISGIPSRFSGSGSGTDFTLSINSVESEDIADYYCQQNNNWPTTFGAGTKLELKRTVAAPSVFIFPPSDEQLKSGTASVVCLLNNFYPREAKVQWKVDNALQSGNSQESVTEQDSKDSTYSLSSTLTLSKADYEKHKVYACEVTHQGLSSPVTKSFNRGECGSTVAAPSEVQLLVSGGGLVQPGGSLRLSCAASGFTFKAYPMMWVRQAPGKGLEWVSEISPSGSYTYYADSVKGRFTISRDNSKNTLYLQMNSLRAEDTAVYYCAKDPRKLDYWGQGTLVTVSS

SEQ ID NO: 191 - protein, 449 aa, Artificial Sequence
  Humanised
QVTLRESGPALVKPTQTLTLTCTVSGFSLTSYSVHWVRQPPGKGLEWLGVIWASGGTDYNSALMSRLSISKDTSRNQVVLTMTNMDPVDTATYYCARDPPSSLLRLDYWGRGTPVTVSSASTKGPSVFPLAPSSKSTSGGTAALGCLVKDYFPEPVTVSWNSGALTSGVHTFPAVLQSSGLYSLSSVVTVPSSSLGTQTYICNVNHKPSNTKVDKRVEPKSCDKTHTCPPCPAPELLGGPSVFLFPPKPKDTLMISRTPEVTCVVVDVSHEDPEVKFNWYVDGVEVHNAKTKPREEQYNSTYRVVSVLTVLHQDWLNGKEYKCKVSNKALPAPIEKTISKAKGQPREPQVYTLPPSREEMTKNQVSLTCLVKGFYPSDIAVEWESNGQPENNYKTTPPVLDSDGSFFLYSKLTVDKSRWQQGNVFSCSVMHEALHNHYTQKSLSLSPGK

SEQ ID NO: 192 - DNA, 1746 bp, Artificial Sequence
  Humanised
caggtgcagctcgtgcagagcggcgccgaagtgaaaaagcccggcagcagcgtgaaggtgagctgcaaggcctccggcttctacatcaaggacacctacatgcactgggtcaggcaggctcctggccagggcctggagtggatgggcactatcgaccccgccaacggcaacaccaagtacgtgcccaagttccagggcagggtgaccatcaccgccgatgagagcaccagcaccgcctacatggaactgagcagcctgaggtctgaggacaccgccgtgtactattgcgccaggagcatctacgacgactaccactacgacgactactacgccatggactactggggacagggcacactagtgaccgtgtccagcgccagcaccaagggccccagcgtgttccccctggcccccagcagcaagagcaccagcggcggcacagccgccctgggctgcctggtgaaggactacttccccgaaccggtgaccgtgtcctggaacagcggagccctgaccagcggcgtgcacaccttccccgccgtgctgcagagcagcggcctgtacagcctgagcagcgtggtgaccgtgcccagcagcagcctgggcacccagacctacatctgtaacgtgaaccacaagcccagcaacaccaaggtggacaagaaggtggagcccaagagctgtgacaagacccacacctgccccccctgccctgcccccgagctgctgggaggccccagcgtgttcctgttcccccccaagcctaaggacaccctgatgatcagcagaacccccgaggtgacctgtgtggtggtggatgtgagccacgaggaccctgaggtgaagttcaactggtacgtggacggcgtggaggtgcacaatgccaagaccaagcccagggaggagcagtacaacagcacctaccgggtggtgtccgtgctgaccgtgctgcaccaggattggctgaacggcaaggagtacaagtgtaaggtgtccaacaaggccctgcctgcccctatcgagaaaaccatcagcaaggccaagggccagcccagagagccccaggtgtacaccctgccccctagcagagatgagctgaccaagaaccaggtgtccctgacctgcctggtgaagggcttctaccccagcgacatcgccgtggagtgggagagcaacggccagcccgagaacaactacaagaccaccccccctgtgctggacagcgatggcagcttcttcctgtacagcaagctgaccgtggacaagagcagatggcagcagggcaacgtgttcagctgctccgtgatgcacgaggccctgcacaatcactacacccagaagagcctgagcctgtcccctggcaagggatcagccagcaccaagggccccacgggatccgaagtgcagctcctggagagcggcggcggcctggtgcagcccggcggcagcctgaggctgagctgcgccgctagcggcttcaccttcaggaacttcggcatgggctgggtcaggcaggcccccggcaagggcctggagtgggtcagctggatcatcagctccggcaccgagacctactacgccgacagcgtgaagggcaggttcaccatcagccgcgacaacagcaagaacaccctgtacctgcagatgaacagcctgagggccgaggacaccgccgtctactactgcgccaagagcctgggcaggttcgactactggggacaggggaccctggtgactgtgagcagc

SEQ ID NO: 193 - protein, 698 aa, Artificial Sequence
  Humanised
EVTLRESGPALVKPTQTLTLTCTFSGFSLSKSVMGVSWIRQPPGKALEWLAHIYWDDDKYYNPSLKSRLTISKDTSKNQVVLTMTNMDPVDTATYYCARRGIRSAMDYWGQGTTVTVSSASTKGPEVQLVQSGTEVKKPGESLKISCKGSGYTVTSYWIGWVRQMPGKGLEWMGFIYPGDSETRYSPTFQGQVTISADKSFNTAFLQWSSLKASDTAMYYCARVGSGWYPYTFDIWGQGTLVTVSSASTKGPSVFPLAPSSKSTSGGTAALGCLVKDYFPEPVTVSWNSGALTSGVHTFPAVLQSSGLYSLSSVVTVPSSSLGTQTYICNVNHKPSNTKVDKKVEPKSCDKTHTCPPCPAPELLGGPSVFLFPPKPKDTLMISRTPEVTCVVVDVSHEDPEVKFNWYVDGVEVHNAKTKPREEQYNSTYRVVSVLTVLHQDWLNGKEYKCKVSNKALPAPIEKTISKAKGQPREPQVYTLPPSRDELTKNQVSLTCLVKGFYPSDIAVEWESNGQPENNYKTTPPVLDSDGSFFLYSKLTVDKSRWQQGNVFSCSVMHEALHNHYTQKSLSLSPGKTVAAPSEVQLLESGGGLVQPGGSLRLSCAASGFTFRNFGMGWVRQAPGKGLEWVSWIISSGTETYYADSVKGRFTISRDNSKNTLYLQMNSLRAEDTAVYYCAKSLGRFDYWGQGTLVTVSS

SEQ ID NO: 194 - protein, 328 aa, Artificial Sequence
  Humanised
DIVMTQSPDSLAVSLGERATINCKASQSVSNDVAWYQQKPGQPPKLLIYYASNRYTGVPDRFSGSGSGTDFTLTISSLQAEDVAVYYCQQDYNSPWTFGGGTKVEIKRTVAAPEIVMTQSPATLSVSPGERATLSCRASESASSNLAWYQQKPGQAPRLFIYTASTRATDIPARFSGSGSGTEFTLTISSLQSEDFAVYYCQQYNNWPSITFGQGTRLEIKRTVAAPSVFIFPPSDEQLKSGTASVVCLLNNFYPREAKVQWKVDNALQSGNSQESVTEQDSKDSTYSLSSTLTLSKADYEKHKVYACEVTHQGLSSPVTKSFNRGEC

SEQ ID NO: 195 - protein, 696 aa, Artificial Sequence
  Humanised
QVTLRESGPALVKPTQTLTLTCTVSGFSLTSYSVHWVRQPPGKGLEWLGVIWASGGTDYNSALMSRLSISKDTSRNQVVLTMTNMDPVDTATYYCARDPPSSLLRLDYWGRGTLVTVSSASTKGPSVFPLAPSSKSTSGGTAALGCLVKDYFPEPVTVSWNSGALTSGVHTFPAVLQSSGLYSLSSVVTVPSSSLGTQTYICNVNHKPSNTKVDKKVEPKSCDKTHTCPPCPAPELLGGPSVFLFPPKPKDTLMISRTPEVTCVVVDVSHEDPEVKFNWYVDGVEVHNAKTKPREEQYNSTYRVVSVLTVLHQDWLNGKEYKCKVSNKALPAPIEKTISKAKGQPREPQVYTLPPSRDELTKNQVSLTCLVKGFYPSDIAVEWESNGQPENNYKTTPPVLDSDGSFFLYSKLTVDKSRWQQGNVFSCSVMHEALHNHYTQKSLSLSPGKGGGGSGVQLLESGGGLVQPGGSLRLSCAASGFTFAWYDMGWVRQAPGKGLEWVSSIDWHGEVTYYADSVKGRFTISRDNSKNTLYLQMNSLRAEDTAVYYCATAEDEPGYDYWGQGTLVTVSSTVAAPSGSEVQLLESGGGLVQPGGSLRLSCAASGFTFRNFGMGWVRQAPGKGLEWVSWIISSGTETYYADSVKGRFTISRDNSKNTLYLQMNSLRAEDTAVYYCAKSLGRFDYWGQGTLVTVSS

SEQ ID NO: 196 - protein, 693 aa, Artificial Sequence
  Humanised
QVQLQQPGAELVKPGASVKMSCKASGYTFTSYNMHWVKQTPGRGLEWIGAIYPGNGDTSYNQKFKGKATLTADKSSSTAYMQLSSLTSEDSAVYYCARSTYYGGDWYFNVWGAGTLVTVSSASTKGPSVFPLAPSSKSTSGGTAALGCLVKDYFPEPVTVSWNSGALTSGVHTFPAVLQSSGLYSLSSVVTVPSSSLGTQTYICNVNHKPSNTKVDKKVEPKSCDKTHTCPPCPAPELLGGPSVFLFPPKPKDTLMISRTPEVTCVVVDVSHEDPEVKFNWYVDGVEVHNAKTKPREEQYNSTYRVVSVLTVLHQDWLNGKEYKCKVSNKALPAPIEKTISKAKGQPREPQVYTLPPSRDELTKNQVSLTCLVKGFYPSDIAVEWESNGQPENNYKTTPPVLDSDGSFFLYSKLTVDKSRWQQGNVFSCSVMHEALHNHYTQKSLSLSPGKTVAAPSGSDIQMTQSPSSLSASVGDRVTITCRASRPISDWLHWYQQKPGKAPKLLIAWASSLQGGVPSRFSGSGSGTDFTLTISSLQPEDFATYYCLQEGWGPPTFGQGTKVEIKRTVAAPSGSGVQLLESGGGLVQPGGSLRLSCAASGFTFAWYDMGWVRQAPGKGLEWVSSIDWHGEVTYYADSVKGRFTISRDNSKNTLYLQMNSLRAEDTAVYYCATAEDEPGYDYWGQGTLVTVSS

SEQ ID NO: 197 - protein, 701 aa, Artificial Sequence [sequence omitted]

SEQ ID NO: 198 - protein, 567 aa, Artificial Sequence
  Humanised
EVQLVESGGGLVQPGGSLRLSCAASGYTFTSYWLHWVRQAPGKGLEWVGMIDPSNSDTRFNPNFKDRFTISADTSKNTAYLQMNSLRAEDTAVYYCATYRSYVTPLDYWGQGTLVTVSSASTKGPSVFPLAPSSKSTSGGTAALGCLVKDYFPEPVTVSWNSGALTSGVHTFPAVLQSSGLYSLSSVVTVPSSSLGTQTYICNVNHKPSNTKVDKKVEPKSCDKTHTCPPCPAPELLGGPSVFLFPPKPKDTLMISRTPEVTCVVVDVSHEDPEVKFNWYVDGVEVHNAKTKPREEQYNSTYRVVSVLTVLHQDWLNGKEYKCKVSNKALPAPIEKTISKAKGQPREPQVYTLPPSRDELTKNQVSLSCAVKGFYPSDIAVEWESNGQPENNYKTTPPVLDSDGSFFLVSKLTVDKSRWQQGNVFSCSVMHEALHNHYTQKSLSLSPGKGSEVQLLVSGGGLVQPGGSLRLSCAASGFTFKAYPMMWVRQAPGKGLEWVSEISPSGSYTYYADSVKGRFTISRDNSKNTLYLQMNSLRAEDTAVYYCAKDPRKLDYWGQGTLVTVSS

SEQ ID NO: 199 - protein, 340 aa, Artificial Sequence
  Humanised
CPPCPAPELLGGPSVFLFPPKPKDTLMISRTPEVTCVVVDVSHEDPEVKFNWYVDGVEVHNAKTKPREEQYNSTYRVVSVLTVLHQDWLNGKEYKCKVSNKALPAPIEKTISKAKGQPREPQVYTLPPSRDELTKNQVSLWCLVKGFYPSDIAVEWESNGQPENNYKTTPPVLDSDGSFFLYSKLTVDKSRWQQGNVFSCSVMHEALHNHYTQKSLSLSPGKGSEVQLLVSGGGLVQPGGSLRLSCAASGFTFKAYPMMWVRQAPGKGLEWVSEISPSGSYTYYADSVKGRFTISRDNSKNTLYLQMNSLRAEDTAVYYCAKDPRKLDYWGQGTLVTVSS

SEQ ID NO: 200 - protein, 220 aa, Artificial Sequence
  Humanised
DIQMTQSPSSLSASVGDRVTITCKSSQSLLYTSSQKNYLAWYQQKPGKAPKLLIYWASTRESGVPSRFSGSGSGTDFTLTISSLQPEDFATYYCQQYYAYPWTFGQGTKVEIKRTVAAPSVFIFPPSDEQLKSGTASVVCLLNNFYPREAKVQWKVDNALQSGNSQESVTEQDSKDSTYSLSSTLTLSKADYEKHKVYACEVTHQGLSSPVTKSFNRGEC

SEQ ID NO: 201 - protein, 552 aa, Artificial Sequence
  Humanised
EVQLVESGGGLVQPGGSLRLSCAASGYTFTSYWLHWVRQAPGKGLEWVGMIDPSNSDTRFNPNFKDRFTISADTSKNTAYLQMNSLRAEDTAVYYCATYRSYVTPLDYWGQGTLVTVSSASTKGPSVFPLAPCSRSTSESTAALGCLVKDYFPEPVTVSWNSGALTSGVHTFPAVLQSSGLYSLSSVVTVPSSSLGTKTYTCNVDHKPSNTKVDKRVAPEFLGGPSVFLFPPKPKDTLMISRTPEVTCVVVDVSQEDPEVQFNWYVDGVEVHNAKTKPREEQFNSTYRVVSVLTVLHQDWLNGKEYKCKVSNKGLPSSIEKTISKAKGQPREPQVYTLPPSQEEMTKNQVSLTCLVKGFYPSDIAVEWESNGQPENNYKTTPPVLDSDGSFFLYSRLTVDKSRWQEGNVFSCSVMHEALHNHYTQKSLSLSLGKGSEVQLLVSGGGLVQPGGSLRLSCAASGFTFKAYPMMWVRQAPGKGLEWVSEISPSGSYTYYADSVKGRFTISRDNSKNTLYLQMNSLRAEDTAVYYCAKDPRKLDYWGQGTLVTVSS

SEQ ID NO: 202 - protein, 449 aa, Artificial Sequence
  Humanised
EVQLVESGGGLVQPGGSLRLSCAASGYTFTSYWLHWVRQAPGKGLEWVGMIDPSNSDTRFNPNFKDRFTISADTSKNTAYLQMNSLRAEDTAVYYCATYRSYVTPLDYWGQGTLVTVSSASTKGPSVFPLAPSSKSTSGGTAALGCLVKDYFPEPVTVSWNSGALTSGVHTFPAVLQSSGLYSLSSVVTVPSSSLGTQTYICNVNHKPSNTKVDKKVEPKSCDKTHTCPPCPAPELLGGPSVFLFPPKPKDTLMISRTPEVTCVVVDVSHEDPEVKFNWYVDGVEVHNAKTKPREEQYNSTYRVVSVLTVLHQDWLNGKEYKCKVSNKALPAPIEKTISKAKGQPREPQVYTLPPSRDELTKNQVSLSCAVKGFYPSDIAVEWESNGQPENNYKTTPPVLDSDGSFFLVSKLTVDKSRWQQGNVFSCSVMHEALHNHYTQKSLSLSPGK

SEQ ID NO: 203 - protein, 222 aa, Artificial Sequence
  Humanised
CPPCPAPELLGGPSVFLFPPKPKDTLMISRTPEVTCVVVDVSHEDPEVKFNWYVDGVEVHNAKTKPREEQYNSTYRVVSVLTVLHQDWLNGKEYKCKVSNKALPAPIEKTISKAKGQPREPQVYTLPPSRDELTKNQVSLWCLVKGFYPSDIAVEWESNGQPENNYKTTPPVLDSDGSFFLYSKLTVDKSRWQQGNVFSCSVMHEALHNHYTQKSLSLSPGK

SEQ ID NO: 204 - protein, 434 aa, Artificial Sequence
  Humanised
EVQLVESGGGLVQPGGSLRLSCAASGYTFTSYWLHWVRQAPGKGLEWVGMIDPSNSDTRFNPNFKDRFTISADTSKNTAYLQMNSLRAEDTAVYYCATYRSYVTPLDYWGQGTLVTVSSASTKGPSVFPLAPCSRSTSESTAALGCLVKDYFPEPVTVSWNSGALTSGVHTFPAVLQSSGLYSLSSVVTVPSSSLGTKTYTCNVDHKPSNTKVDKRVAPEFLGGPSVFLFPPKPKDTLMISRTPEVTCVVVDVSQEDPEVQFNWYVDGVEVHNAKTKPREEQFNSTYRVVSVLTVLHQDWLNGKEYKCKVSNKGLPSSIEKTISKAKGQPREPQVYTLPPSQEEMTKNQVSLTCLVKGFYPSDIAVEWESNGQPENNYKTTPPVLDSDGSFFLYSRLTVDKSRWQEGNVFSCSVMHEALHNHYTQKSLSLSLGK

SEQ ID NO: 205 - DNA, 1365 bp, Artificial Sequence
  Humanised
caggtgcagctcgtgcagagcggcgccgaagtgaaaaagcccggcagcagcgtgaaggtgagctgcaaggcctccggcttctacatcaaggacacctacatgcactgggtcaggcaggctcctggccagggcctggagtggatgggcactatcgaccccgccaacggcaacaccaagtacgtgcccaagttccagggcagggtgaccatcaccgccgatgagagcaccagcaccgcctacatggaactgagcagcctgaggtctgaggacaccgccgtgtactattgcgccaggagcatctacgacgactaccactacgacgactactacgccatggactactggggacagggcacactagtgaccgtgtccagcgccagcaccaagggccccagcgtgttccccctggcccccagcagcaagagcaccagcggcggcacagccgccctgggctgcctggtgaaggactacttccccgaaccggtgaccgtgtcctggaacagcggagccctgaccagcggcgtgcacaccttccccgccgtgctgcagagcagcggcctgtacagcctgagcagcgtggtgaccgtgcccagcagcagcctgggcacccagacctacatctgtaacgtgaaccacaagcccagcaacaccaaggtggacaagaaggtggagcccaagagctgtgacaagacccacacctgccccccctgccctgcccccgagctgctgggaggccccagcgtgttcctgttcccccccaagcctaaggacaccctgatgatcagcagaacccccgaggtgacctgtgtggtggtggatgtgagccacgaggaccctgaggtgaagttcaactggtacgtggacggcgtggaggtgcacaatgccaagaccaagcccagggaggagcagtacaacagcacctaccgggtggtgtccgtgctgaccgtgctgcaccaggattggctgaacggcaaggagtacaagtgtaaggtgtccaacaaggccctgcctgcccctatcgagaaaaccatcagcaaggccaagggccagcccagagagccccaggtgtacaccctgccccctagcagagatgagctgaccaagaaccaggtgtccctgacctgcctggtgaagggcttctaccccagcgacatcgccgtggagtgggagagcaacggccagcccgagaacaactacaagaccaccccccctgtgctggacagcgatggcagcttcttcctgtacagcaagctgaccgtggacaagagcagatggcagcagggcaacgtgttcagctgctccgtgatgcacgaggccctgcacaatcactacacccagaagagcctgagcctgtcccctggcaag

SEQ ID NO: 206 - DNA, 1365 bp, Artificial Sequence
  Humanised
caggtgcagctggtgcagtctggggctgaggtgaagaagcctgggtcctcggtgaaggtctcctgcaaggcttctggattctacattaaagacacctatatgcactgggtgcgacaggcccctggacaagggcttgagtggatgggaacgattgatcctgcgaatggtaatactaaatatgtcccgaagttccagggcagagtcacgattaccgcggacgaatccacgagcacagcctacatggagctgagcagcctgagatctgaggacacggccgtgtattactgtgcgagaagcatctatgatgattaccactacgacgattactatgctatggactactggggccaagggacactagtcacagtctcctcagcctccaccaagggcccatcggtcttccccctggcaccctcctccaagagcacctctgggggcacagcggccctgggctgcctggtcaaggactacttccccgaaccggtgacggtgtcgtggaactcaggcgccctgaccagcggcgtgcacaccttcccggctgtcctacagtcctcaggactctactccctcagcagcgtggtgaccgtgccctccagcagcttgggcacccagacctacatctgcaacgtgaatcacaagcccagcaacaccaaggtggacaagaaagttgagcccaaatcttgtgacaaaactcacacatgcccaccgtgcccagcacctgaactcctggggggaccgtcagtcttcctcttccccccaaaacccaaggacaccctcatgatctcccggacccctgaggtcacatgcgtggtggtggacgtgagccacgaagaccctgaggtcaagttcaactggtacgtggacggcgtggaggtgcataatgccaagacaaagccgcgggaggagcagtacaacagcacgtaccgtgtggtcagcgtcctcaccgtcctgcaccaggactggctgaatggcaaggagtacaagtgcaaggtctccaacaaagccctcccagcccccatcgagaaaaccatctccaaagccaaagggcagccccgagaaccacaggtgtacaccctgcccccatcccgggatgagctgaccaagaaccaggtcagcctgacctgcctggtcaaaggcttctatcccagcgacatcgccgtggagtgggagagcaatgggcagccggagaacaactacaagaccacgcctcccgtgctggactccgacggctccttcttcctctacagcaagctcaccgtggacaagagcaggtggcagcaggggaacgtcttctcatgctccgtgatgcatgaggctctgcacaaccactacacgcagaagagcctctccctgtctccgggtaaa

SEQ ID NO: 207 - protein, 567 aa, Artificial Sequence
  Humanised
QVTLRESGPALVKPTQTLTLTCTFSGFSLSTSGMGVSWIRQPPGKGLEWLAHIYWDDDKRYNPSLKSRLTISKDTSRNQVVLTMTNMDPVDTATYYCARRETVFYWYFDVWGRGTLVTVSSASTKGPSVFPLAPCSRSTSESTAALGCLVKDYFPEPVTVSWNSGALTSGVHTFPAVLQSSGLYSLSSVVTVPSSNFGTQTYTCNVDHKPSNTKVDKTVERKCCVECPPCPAPPVAGPSVFLFPPKPKDTLMISRTPEVTCVVVDVSHEDPEVQFNWYVDGVEVHNAKTKPREEQFNSTFRVVSVLTVVHQDWLNGKEYKCKVSNKGLPAPIEKTISKTKGQPREPQVYTLPPSREEMTKNQVSLTCLVKGFYPSDIAVEWESNGQPENNYKTTPPMLDSDGSFFLYSKLTVDKSRWQQGNVFSCSVMHEALHNHYTQKSLSLSPGKGSGVQLLESGGGLVQPGGSLRLSCAASGFTFAWYDMGWVRQAPGKGLEWVSSIDWHGEVTYYADSVKGRFTISRDNSKNTLYLQMNSLRAEDTAVYYCATAEDEPGYDYWGQGTLVTVSS

SEQ ID NO: 208 - protein, 568 aa, Artificial Sequence
  Humanised
QVTLRESGPALVKPTQTLTLTCTFSGFSLSTSGMGVSWIRQPPGKGLEWLAHIYWDDDKRYNPSLKSRLTISKDTSRNQVVLTMTNMDPVDTATYYCARRETVFYWYFDVWGRGTLVTVSSASTKGPSVFPLAPCSRSTSESTAALGCLVKDYFPEPVTVSWNSGALTSGVHTFPAVLQSSGLYSLSSVVTVPSSSLGTKTYTCNVDHKPSNTKVDKRVESKYGPPCPSCPAPEFLGGPSVFLFPPKPKDTLMISRTPEVTCVVVDVSQEDPEVQFNWYVDGVEVHNAKTKPREEQFNSTYRVVSVLTVLHQDWLNGKEYKCKVSNKGLPSSIEKTISKAKGQPREPQVYTLPPSQEEMTKNQVSLTCLVKGFYPSDIAVEWESNGQPENNYKTTPPVLDSDGSFFLYSRLTVDKSRWQEGNVFSCSVMHEALHNHYTQKSLSLSLGKGSGVQLLESGGGLVQPGGSLRLSCAASGFTFAWYDMGWVRQAPGKGLEWVSSIDWHGEVTYYADSVKGRFTISRDNSKNTLYLQMNSLRAEDTAVYYCATAEDEPGYDYWGQGTLVTVSS

SEQ ID NO: 209 - protein, 568 aa, Artificial Sequence
  Humanised
QVTLRESGPALVKPTQTLTLTCTFSGFSLSTSGMGVSWIRQPPGKGLEWLAHIYWDDDKRYNPSLKSRLTISKDTSRNQVVLTMTNMDPVDTATYYCARRETVFYWYFDVWGRGTLVTVSSASTKGPSVFPLAPCSRSTSESTAALGCLVKDYFPEPVTVSWNSGALTSGVHTFPAVLQSSGLYSLSSVVTVPSSSLGTKTYTCNVDHKPSNTKVDKRVESKYGPPCPPCPAPEFEGGPSVFLFPPKPKDTLMISRTPEVTCVVVDVSQEDPEVQFNWYVDGVEVHNAKTKPREEQFNSTYRVVSVLTVLHQDWLNGKEYKCKVSNKGLPSSIEKTISKAKGQPREPQVYTLPPSQEEMTKNQVSLTCLVKGFYPSDIAVEWESNGQPENNYKTTPPVLDSDGSFFLYSRLTVDKSRWQEGNVFSCSVMHEALHNHYTQKSLSLSLGKGSGVQLLESGGGLVQPGGSLRLSCAASGFTFAWYDMGWVRQAPGKGLEWVSSIDWHGEVTYYADSVKGRFTISRDNSKNTLYLQMNSLRAEDTAVYYCATAEDEPGYDYWGQGTLVTVSS

SEQ ID NO: 210 - DNA, 657 bp, Artificial Sequence
  Humanised
gacatcgtgatgacccagtctcctctgagcctccccgtgacccccggcgaaccagccagcatctcctgcagaagcagccagaacatcgtgcacatcaacggcaacacctacctggagtggtacctgcaaaagcccggccagagccccaggctgctgatctacaagatcagcgacaggttcagcggcgtgcccgataggttcagcggcagcggcagcggcaccgacttcaccctgaagatcagcagggtggaggccgacgacgtgggcatctactactgcttccagggcagccacgtcccctggactttcggacagggcaccaagctggagattaagcgtacggtggccgcccccagcgtgttcatcttcccccccagcgatgagcagctgaagagcggcaccgccagcgtggtgtgtctgctgaacaacttctacccccgggaggccaaggtgcagtggaaggtggacaatgccctgcagagcggcaacagccaggagagcgtgaccgagcaggacagcaaggactccacctacagcctgagcagcaccctgaccctgagcaaggccgactacgagaagcacaaggtgtacgcctgtgaggtgacccaccagggcctgtccagccccgtgaccaagagcttcaaccggggcgagtgc

SEQ ID NO: 211 - DNA, 1353 bp, Artificial Sequence
  Humanised
caggtgaccctgagggagagcggccccgccctggtgaagcccacccagaccctgaccctgacctgcaccttcagcggctttagcctcagcacctccggcatgggcgtgagctggatcaggcagccacccggcaaaggcctggagtggctggcccacatctactgggacgacgacaagaggtacaaccccagcctgaagagccggctgaccatcagcaaggataccagcaggaaccaggtggtgctgaccatgaccaacatggaccccgtggacaccgctacctactactgcgccaggagggagaccgtcttctactggtacttcgacgtgtggggaaggggcacactagtgaccgtgtccagcgccagcaccaagggccccagcgtgttccccctggcccccagcagcaagagcaccagcggcggcacagccgccctgggctgcctggtgaaggactacttccccgaaccggtgaccgtgtcctggaacagcggagccctgaccagcggcgtgcacaccttccccgccgtgctgcagagcagcggcctgtacagcctgagcagcgtggtgaccgtgcccagcagcagcctgggcacccagacctacatctgtaacgtgaaccacaagcccagcaacaccaaggtggacaagaaggtggagcccaagagctgtgacaagacccacacctgccccccctgccctgcccccgagctgctgggaggccccagcgtgttcctgttcccccccaagcctaaggacaccctgatgatcagcagaacccccgaggtgacctgtgtggtggtggatgtgagccacgaggaccctgaggtgaagttcaactggtacgtggacggcgtggaggtgcacaatgccaagaccaagcccagggaggagcagtacaacagcacctaccgggtggtgtccgtgctgaccgtgctgcaccaggattggctgaacggcaaggagtacaagtgtaaggtgtccaacaaggccctgcctgcccctatcgagaaaaccatcagcaaggccaagggccagcccagagagccccaggtgtacaccctgccccctagcagagatgagctgaccaagaaccaggtgtccctgacctgcctggtgaagggcttctaccccagcgacatcgccgtggagtgggagagcaacggccagcccgagaacaactacaagaccaccccccctgtgctggacagcgatggcagcttcttcctgtacagcaagctgaccgtggacaagagcagatggcagcagggcaacgtgttcagctgctccgtgatgcacgaggccctgcacaatcactacacccagaagagcctgagcctgtcccctggcaag

SEQ ID NO: 212 - DNA, 654 bp, Artificial Sequence
  Humanised
gacatcgtgctgacccagagcccctcttccctgagcgcaagcgtgggcgatagggtgaccatcacctgcaaggccagccagagcgtggactacgacggcgacagctacatgaactggtaccagcagaagcccggcaaggcccccaaactgctgatctacgccgccagcaacctcgagtcaggcattcccagcaggtttagcggcagcggcagcggcaccgacttcaccttcacaatcagcagcctgcagcccgaggacatcgccacctactactgccagcagagcaacgaggaccctcccaccttcggacagggcaccaaggtcgagatcaagcgtacggtggccgcccccagcgtgttcatcttcccccccagcgatgagcagctgaagagcggcaccgccagcgtggtgtgtctgctgaacaacttctacccccgggaggccaaggtgcagtggaaggtggacaatgccctgcagagcggcaacagccaggagagcgtgaccgagcaggacagcaaggactccacctacagcctgagcagcaccctgaccctgagcaaggccgactacgagaagcacaaggtgtacgcctgtgaggtgacccaccagggcctgtccagccccgtgaccaagagcttcaaccggggcgagtgc

SEQ ID NO: 213 - DNA, 1347 bp, Artificial Sequence
  Humanised
caggtgaccctgagggagagcggccccgccctggtgaagcccacacagaccctcactctgacctgcaccgtgagcggcttcagcctgacctcctacagcgtccactgggtgaggcagccccccggcaagggcctggagtggctgggcgtgatctgggcaagcggcggcaccgactacaacagcgccctgatgagcaggctctccatcagcaaggacaccagccggaaccaggtggtgctgaccatgaccaacatggaccccgtggacaccgccacctattactgcgccagggaccctccctctagcctgctgaggctggactactggggcaggggaacactagtgaccgtgtccagcgccagcaccaagggccccagcgtgttccccctggcccccagcagcaagagcaccagcggcggcacagccgccctgggctgcctggtgaaggactacttccccgaaccggtgaccgtgtcctggaacagcggagccctgaccagcggcgtgcacaccttccccgccgtgctgcagagcagcggcctgtacagcctgagcagcgtggtgaccgtgcccagcagcagcctgggcacccagacctacatctgtaacgtgaaccacaagcccagcaacaccaaggtggacaagaaggtggagcccaagagctgtgacaagacccacacctgccccccctgccctgcccccgagctgctgggaggccccagcgtgttcctgttcccccccaagcctaaggacaccctgatgatcagcagaacccccgaggtgacctgtgtggtggtggatgtgagccacgaggaccctgaggtgaagttcaactggtacgtggacggcgtggaggtgcacaatgccaagaccaagcccagggaggagcagtacaacagcacctaccgggtggtgtccgtgctgaccgtgctgcaccaggattggctgaacggcaaggagtacaagtgtaaggtgtccaacaaggccctgcctgcccctatcgagaaaaccatcagcaaggccaagggccagcccagagagccccaggtgtacaccctgccccctagcagagatgagctgaccaagaaccaggtgtccctgacctgcctggtgaagggcttctaccccagcgacatcgccgtggagtgggagagcaacggccagcccgagaacaactacaagaccaccccccctgtgctggacagcgatggcagcttcttcctgtacagcaagctgaccgtggacaagagcagatggcagcagggcaacgtgttcagctgctccgtgatgcacgaggccctgcacaatcactacacccagaagagcctgagcctgtcccctggcaag

SEQ ID NO: 214 - DNA, 660 bp, Artificial Sequence
  Humanised
gacatcgtgatgacccagtctcccgattcactggccgtgagcctgggcgagagggccaccatcaactgcaagagcagccagagcctcctgaacagcggcaaccagaagaactacctggcctggtaccagcagaaacccggccagccccccaagctgctgatctatggcgcctccaccagggagagcggcgtgccagacaggtttagcggcagcggcagcggcaccgacttcaccctgacaatcagcagcctgcaggccgaggacgtggccgtgtactactgccagaacgtccacagcttccccttcaccttcggcgggggaaccaagctggagatcaagcgtacggtggccgcccccagcgtgttcatcttcccccccagcgatgagcagctgaagagcggcaccgccagcgtggtgtgtctgctgaacaacttctacccccgggaggccaaggtgcagtggaaggtggacaatgccctgcagagcggcaacagccaggagagcgtgaccgagcaggacagcaaggactccacctacagcctgagcagcaccctgaccctgagcaaggccgactacgagaagcacaaggtgtacgcctgtgaggtgacccaccagggcctgtccagccccgtgaccaagagcttcaaccggggcgagtgc

SEQ ID NO: 215 - DNA, 1713 bp, Artificial Sequence
  Humanised
caggtgaccctgagggagagcggccccgccctggtgaagcccacccagaccctgaccctgacctgcaccttcagcggctttagcctcagcacctccggcatgggcgtgagctggatcaggcagccacccggcaaaggcctggagtggctggcccacatctactgggacgacgacaagaggtacaaccccagcctgaagagccggctgaccatcagcaaggataccagcaggaaccaggtggtgctgaccatgaccaacatggaccccgtggacaccgctacctactactgcgccaggagggagaccgtcttctactggtacttcgacgtgtggggaaggggcacactagtgaccgtgtccagcgccagcaccaagggccccagcgtgttccccctggcccccagcagcaagagcaccagcggcggcacagccgccctgggctgcctggtgaaggactacttccccgaaccggtgaccgtgtcctggaacagcggagccctgaccagcggcgtgcacaccttccccgccgtgctgcagagcagcggcctgtacagcctgagcagcgtggtgaccgtgcccagcagcagcctgggcacccagacctacatctgtaacgtgaaccacaagcccagcaacaccaaggtggacaagaaggtggagcccaagagctgtgacaagacccacacctgccccccctgccctgcccccgagctgctgggaggccccagcgtgttcctgttcccccccaagcctaaggacaccctgatgatcagcagaacccccgaggtgacctgtgtggtggtggatgtgagccacgaggaccctgaggtgaagttcaactggtacgtggacggcgtggaggtgcacaatgccaagaccaagcccagggaggagcagtacaacagcacctaccgggtggtgtccgtgctgaccgtgctgcaccaggattggctgaacggcaaggagtacaagtgtaaggtgtccaacaaggccctgcctgcccctatcgagaaaaccatcagcaaggccaagggccagcccagagagccccaggtgtacaccctgccccctagcagagatgagctgaccaagaaccaggtgtccctgacctgcctggtgaagggcttctaccccagcgacatcgccgtggagtgggagagcaacggccagcccgagaacaactacaagaccaccccccctgtgctggacagcgatggcagcttcttcctgtacagcaagctgaccgtggacaagagcagatggcagcagggcaacgtgttcagctgctccgtgatgcacgaggccctgcacaatcactacacccagaagagcctgagcctgtcccctggcaagggatccggcgtgcagctcctggagagcggcggaggcctggtccagcccggcggcagcctgaggctgagctgcgccgccagcggcttcaccttcgcctggtatgatatgggctgggtgaggcaggcccccggcaagggcctggagtgggtgtccagcatcgactggcacggggaggtgacctactacgccgacagcgtgaagggcaggttcaccatcagcagggacaacagcaagaacaccctgtacctgcagatgaacagcctgagggccgaggacaccgcagtgtactactgcgccaccgccgaggacgaacccggctacgactactggggccagggcaccctggtgactgtgagcagc

SEQ ID NO: 216 - DNA, 1731 bp, Artificial Sequence
  Humanised
caggtgaccctgagggagagcggccccgccctggtgaagcccacccagaccctgaccctgacctgcaccttcagcggctttagcctcagcacctccggcatgggcgtgagctggatcaggcagccacccggcaaaggcctggagtggctggcccacatctactgggacgacgacaagaggtacaaccccagcctgaagagccggctgaccatcagcaaggataccagcaggaaccaggtggtgctgaccatgaccaacatggaccccgtggacaccgctacctactactgcgccaggagggagaccgtcttctactggtacttcgacgtgtggggaaggggcacactagtgaccgtgtccagcgccagcaccaagggccccagcgtgttccccctggcccccagcagcaagagcaccagcggcggcacagccgccctgggctgcctggtgaaggactacttccccgaaccggtgaccgtgtcctggaacagcggagccctgaccagcggcgtgcacaccttccccgccgtgctgcagagcagcggcctgtacagcctgagcagcgtggtgaccgtgcccagcagcagcctgggcacccagacctacatctgtaacgtgaaccacaagcccagcaacaccaaggtggacaagaaggtggagcccaagagctgtgacaagacccacacctgccccccctgccctgcccccgagctgctgggaggccccagcgtgttcctgttcccccccaagcctaaggacaccctgatgatcagcagaacccccgaggtgacctgtgtggtggtggatgtgagccacgaggaccctgaggtgaagttcaactggtacgtggacggcgtggaggtgcacaatgccaagaccaagcccagggaggagcagtacaacagcacctaccgggtggtgtccgtgctgaccgtgctgcaccaggattggctgaacggcaaggagtacaagtgtaaggtgtccaacaaggccctgcctgcccctatcgagaaaaccatcagcaaggccaagggccagcccagagagccccaggtgtacaccctgccccctagcagagatgagctgaccaagaaccaggtgtccctgacctgcctggtgaagggcttctaccccagcgacatcgccgtggagtgggagagcaacggccagcccgagaacaactacaagaccaccccccctgtgctggacagcgatggcagcttcttcctgtacagcaagctgaccgtggacaagagcagatggcagcagggcaacgtgttcagctgctccgtgatgcacgaggccctgcacaatcactacacccagaagagcctgagcctgtcccctggcaagaccgtggccgccccctcgggatccggcgtgcagctcctggagagcggcggaggcctggtccagcccggcggcagcctgaggctgagctgcgccgccagcggcttcaccttcgcctggtatgatatgggctgggtgaggcaggcccccggcaagggcctggagtgggtgtccagcatcgactggcacggggaggtgacctactacgccgacagcgtgaagggcaggttcaccatcagcagggacaacagcaagaacaccctgtacctgcagatgaacagcctgagggccgaggacaccgcagtgtactactgcgccaccgccgaggacgaacccggctacgactactggggccagggcaccctggtgactgtgagcagc

SEQ ID NO: 217 - DNA, 1014 bp, Artificial Sequence
  Humanised
gacatcgtgctgacccagagcccctcttccctgagcgcaagcgtgggcgatagggtgaccatcacctgcaaggccagccagagcgtggactacgacggcgacagctacatgaactggtaccagcagaagcccggcaaggcccccaaactgctgatctacgccgccagcaacctcgagtcaggcattcccagcaggtttagcggcagcggcagcggcaccgacttcaccttcacaatcagcagcctgcagcccgaggacatcgccacctactactgccagcagagcaacgaggaccctcccaccttcggacagggcaccaaggtcgagatcaagcgtacggtggccgcccccagcgtgttcatcttcccccccagcgatgagcagctgaagagcggcaccgccagcgtggtgtgtctgctgaacaacttctacccccgggaggccaaggtgcagtggaaggtggacaatgccctgcagagcggcaacagccaggagagcgtgaccgagcaggacagcaaggactccacctacagcctgagcagcaccctgaccctgagcaaggccgactacgagaagcacaaggtgtacgcctgtgaggtgacccaccagggcctgtccagccccgtgaccaagagcttcaaccggggcgagtgtggatccggcgtgcagctcctggagagcggcggaggcctggtccagcccggcggcagcctgaggctgagctgcgccgccagcggcttcaccttcgcctggtatgatatgggctgggtgaggcaggcccccggcaagggcctggagtgggtgtccagcatcgactggcacggggaggtgacctactacgccgacagcgtgaagggcaggttcaccatcagcagggacaacagcaagaacaccctgtacctgcagatgaacagcctgagggccgaggacaccgcagtgtactactgcgccaccgccgaggacgaacccggctacgactactggggccagggcaccctggtgactgtgagcagc

SEQ ID NO: 218 - DNA, 1032 bp, Artificial Sequence
  Humanised
gacatcgtgctgacccagagcccctcttccctgagcgcaagcgtgggcgatagggtgaccatcacctgcaaggccagccagagcgtggactacgacggcgacagctacatgaactggtaccagcagaagcccggcaaggcccccaaactgctgatctacgccgccagcaacctcgagtcaggcattcccagcaggtttagcggcagcggcagcggcaccgacttcaccttcacaatcagcagcctgcagcccgaggacatcgccacctactactgccagcagagcaacgaggaccctcccaccttcggacagggcaccaaggtcgagatcaagcgtacggtggccgcccccagcgtgttcatcttcccccccagcgatgagcagctgaagagcggcaccgccagcgtggtgtgtctgctgaacaacttctacccccgggaggccaaggtgcagtggaaggtggacaatgccctgcagagcggcaacagccaggagagcgtgaccgagcaggacagcaaggactccacctacagcctgagcagcaccctgaccctgagcaaggccgactacgagaagcacaaggtgtacgcctgtgaggtgacccaccagggcctgtccagccccgtgaccaagagcttcaaccggggcgagtgcaccgtggccgccccctcgggatccggcgtgcagctcctggagagcggcggaggcctggtccagcccggcggcagcctgaggctgagctgcgccgccagcggcttcaccttcgcctggtatgatatgggctgggtgaggcaggcccccggcaagggcctggagtgggtgtccagcatcgactggcacggggaggtgacctactacgccgacagcgtgaagggcaggttcaccatcagcagggacaacagcaagaacaccctgtacctgcagatgaacagcctgagggccgaggacaccgcagtgtactactgcgccaccgccgaggacgaacccggctacgactactggggccagggcaccctggtgactgtgagcagc

SEQ ID NO: 219 - DNA, 1710 bp, Artificial Sequence
  Humanised
caggtgaccctgagggagagcggccccgccctggtgaagcccacacagaccctcactctgacctgcaccgtgagcggcttcagcctgacctcctacagcgtccactgggtgaggcagccccccggcaagggcctggagtggctgggcgtgatctgggcaagcggcggcaccgactacaacagcgccctgatgagcaggctctccatcagcaaggacaccagccggaaccaggtggtgctgaccatgaccaacatggaccccgtggacaccgccacctattactgcgccagggaccctccctctagcctgctgaggctggactactggggcaggggaacactagtgaccgtgtccagcgccagcaccaagggccccagcgtgttccccctggcccccagcagcaagagcaccagcggcggcacagccgccctgggctgcctggtgaaggactacttccccgaaccggtgaccgtgtcctggaacagcggagccctgaccagcggcgtgcacaccttccccgccgtgctgcagagcagcggcctgtacagcctgagcagcgtggtgaccgtgcccagcagcagcctgggcacccagacctacatctgtaacgtgaaccacaagcccagcaacaccaaggtggacaagaaggtggagcccaagagctgtgacaagacccacacctgccccccctgccctgcccccgagctgctgggaggccccagcgtgttcctgttcccccccaagcctaaggacaccctgatgatcagcagaacccccgaggtgacctgtgtggtggtggatgtgagccacgaggaccctgaggtgaagttcaactggtacgtggacggcgtggaggtgcacaatgccaagaccaagcccagggaggagcagtacaacagcacctaccgggtggtgtccgtgctgaccgtgctgcaccaggattggctgaacggcaaggagtacaagtgtaaggtgtccaacaaggccctgcctgcccctatcgagaaaaccatcagcaaggccaagggccagcccagagagccccaggtgtacaccctgccccctagcagagatgagctgaccaagaaccaggtgtccctgacctgcctggtgaagggcttctaccccagcgacatcgccgtggagtgggagagcaacggccagcccgagaacaactacaagaccaccccccctgtgctggacagcgatggcagcttcttcctgtacagcaagctgaccgtggacaagagcagatggcagcagggcaacgtgttcagctgctccgtgatgcacgaggccctgcacaatcactacacccagaagagcctgagcctgtcccctggcaagggcggcggcggatccgaagtgcagctcctggagagcggcggcggcctggtgcagcccggcggcagcctgaggctgagctgcgccgctagcggcttcaccttcaggaacttcggcatgggctgggtcaggcaggcccccggcaagggcctggagtgggtcagctggatcatcagctccggcaccgagacctactacgccgacagcgtgaagggcaggttcaccatcagccgcgacaacagcaagaacaccctgtacctgcagatgaacagcctgagggccgaggacaccgccgtctactactgcgccaagagcctgggcaggttcgactactggggacaggggaccctggtgactgtgagcagc

SEQ ID NO: 220 - DNA, 1029 bp, Artificial Sequence
  Humanised
gacatcgtgatgacccagtctcccgattcactggccgtgagcctgggcgagagggccaccatcaactgcaagagcagccagagcctcctgaacagcggcaaccagaagaactacctggcctggtaccagcagaaacccggccagccccccaagctgctgatctatggcgcctccaccagggagagcggcgtgccagacaggtttagcggcagcggcagcggcaccgacttcaccctgacaatcagcagcctgcaggccgaggacgtggccgtgtactactgccagaacgtccacagcttccccttcaccttcggcgggggaaccaagctggagatcaagcgtacggtggccgcccccagcgtgttcatcttcccccccagcgatgagcagctgaagagcggcaccgccagcgtggtgtgtctgctgaacaacttctacccccgggaggccaaggtgcagtggaaggtggacaatgccctgcagagcggcaacagccaggagagcgtgaccgagcaggacagcaaggactccacctacagcctgagcagcaccctgaccctgagcaaggccgactacgagaagcacaaggtgtacgcctgtgaggtgacccaccagggcctgtccagccccgtgaccaagagcttcaaccggggcgagtgcggcggcggcggatccggcgtgcagctcctggagagcggcggaggcctggtccagcccggcggcagcctgaggctgagctgcgccgccagcggcttcaccttcgcctggtatgatatgggctgggtgaggcaggcccccggcaagggcctggagtgggtgtccagcatcgactggcacggggaggtgacctactacgccgacagcgtgaagggcaggttcaccatcagcagggacaacagcaagaacaccctgtacctgcagatgaacagcctgagggccgaggacaccgcagtgtactactgcgccaccgccgaggacgaacccggctacgactactggggccagggcaccctggtgactgtgagcagc

SEQ ID NO: 221 - DNA, 1713 bp, Artificial Sequence
  Humanised
caggtgcagctcgtgcagagcggcgccgaagtgaaaaagcccggcagcagcgtgaaggtgagctgcaaggcctccggcttctacatcaaggacacctacatgcactgggtcaggcaggctcctggccagggcctggagtggatgggcactatcgaccccgccaacggcaacaccaagtacgtgcccaagttccagggcagggtgaccatcaccgccgatgagagcaccagcaccgcctacatggaactgagcagcctgaggtctgaggacaccgccgtgtactattgcgccaggagcatctacgacgactaccactacgacgactactacgccatggactactggggacagggcacactagtgaccgtgtccagcgccagcaccaagggccccagcgtgttccccctggcccccagcagcaagagcaccagcggcggcacagccgccctgggctgcctggtgaaggactacttccccgaaccggtgaccgtgtcctggaacagcggagccctgaccagcggcgtgcacaccttccccgccgtgctgcagagcagcggcctgtacagcctgagcagcgtggtgaccgtgcccagcagcagcctgggcacccagacctacatctgtaacgtgaaccacaagcccagcaacaccaaggtggacaagaaggtggagcccaagagctgtgacaagacccacacctgccccccctgccctgcccccgagctgctgggaggccccagcgtgttcctgttcccccccaagcctaaggacaccctgatgatcagcagaacccccgaggtgacctgtgtggtggtggatgtgagccacgaggaccctgaggtgaagttcaactggtacgtggacggcgtggaggtgcacaatgccaagaccaagcccagggaggagcagtacaacagcacctaccgggtggtgtccgtgctgaccgtgctgcaccaggattggctgaacggcaaggagtacaagtgtaaggtgtccaacaaggccctgcctgcccctatcgagaaaaccatcagcaaggccaagggccagcccagagagccccaggtgtacaccctgccccctagcagagatgagctgaccaagaaccaggtgtccctgacctgcctggtgaagggcttctaccccagcgacatcgccgtggagtgggagagcaacggccagcccgagaacaactacaagaccaccccccctgtgctggacagcgatggcagcttcttcctgtacagcaagctgaccgtggacaagagcagatggcagcagggcaacgtgttcagctgctccgtgatgcacgaggccctgcacaatcactacacccagaagagcctgagcctgtcccctggcaaggaagtgcagctcctggagagcggcggcggcctggtgcagcccggcggcagcctgaggctgagctgcgccgctagcggcttcaccttcaggaacttcggcatgggctgggtcaggcaggcccccggcaagggcctggagtgggtcagctggatcatcagctccggcaccgagacctactacgccgacagcgtgaagggcaggttcaccatcagccgcgacaacagcaagaacaccctgtacctgcagatgaacagcctgagggccgaggacaccgccgtctactactgcgccaagagcctgggcaggttcgactactggggacaggggaccctggtgactgtgagcagc

SEQ ID NO: 222 - DNA, 1731 bp, Artificial Sequence
  Humanised
caggtgcagctcgtgcagagcggcgccgaagtgaaaaagcccggcagcagcgtgaaggtgagctgcaaggcctccggcttctacatcaaggacacctacatgcactgggtcaggcaggctcctggccagggcctggagtggatgggcactatcgaccccgccaacggcaacaccaagtacgtgcccaagttccagggcagggtgaccatcaccgccgatgagagcaccagcaccgcctacatggaactgagcagcctgaggtctgaggacaccgccgtgtactattgcgccaggagcatctacgacgactaccactacgacgactactacgccatggactactggggacagggcacactagtgaccgtgtctagcgccagcaccaagggccccagcgtgttccccctggcccccagcagcaagagcaccagcggcggcacagccgccctgggctgcctggtgaaggactacttccccgaaccggtgaccgtgtcctggaacagcggagccctgaccagcggcgtgcacaccttccccgccgtgctgcagagcagcggcctgtacagcctgagcagcgtggtgaccgtgcccagcagcagcctgggcacccagacctacatctgtaacgtgaaccacaagcccagcaacaccaaggtggacaagaaggtggagcccaagagctgtgacaagacccacacctgccccccctgccctgcccccgagctgctgggaggccccagcgtgttcctgttcccccccaagcctaaggacaccctgatgatcagcagaacccccgaggtgacctgtgtggtggtggatgtgagccacgaggaccctgaggtgaagttcaactggtacgtggacggcgtggaggtgcacaatgccaagaccaagcccagggaggagcagtacaacagcacctaccgggtggtgtccgtgctgaccgtgctgcaccaggattggctgaacggcaaggagtacaagtgtaaggtgtccaacaaggccctgcctgcccctatcgagaaaaccatcagcaaggccaagggccagcccagagagccccaggtgtacaccctgccccctagcagagatgagctgaccaagaaccaggtgtccctgacctgcctggtgaagggcttctaccccagcgacatcgccgtggagtgggagagcaacggccagcccgagaacaactacaagaccaccccccctgtgctggacagcgatggcagcttcttcctgtacagcaagctgaccgtggacaagagcagatggcagcagggcaacgtgttcagctgctccgtgatgcacgaggccctgcacaatcactacacccagaagagcctgagcctgtcccctggcaagaccgtggccgccccctcggaagtgcagctcctggagagcggcggcggcctggtgcagcccggcggcagcctgaggctgagctgcgccgctagcggcttcaccttcaggaacttcggcatgggctgggtcaggcaggcccccggcaagggcctggagtgggtcagctggatcatcagctccggcaccgagacctactacgccgacagcgtgaagggcaggttcaccatcagccgcgacaacagcaagaacaccctgtacctgcagatgaacagcctgagggccgaggacaccgccgtctactactgcgccaagagcctgggcaggttcgactactggggacaggggaccctggtgactgtgagcagc

SEQ ID NO: 223 - DNA, 1707 bp, Artificial Sequence
  Humanised
caggtgaccctgagggagagcggccccgccctggtgaagcccacccagaccctgaccctgacctgcaccttcagcggctttagcctcagcacctccggcatgggcgtgagctggatcaggcagccacccggcaaaggcctggagtggctggcccacatctactgggacgacgacaagaggtacaaccccagcctgaagagccggctgaccatcagcaaggataccagcaggaaccaggtggtgctgaccatgaccaacatggaccccgtggacaccgctacctactactgcgccaggagggagaccgtcttctactggtacttcgacgtgtggggaaggggcacactagtgaccgtgtccagcgccagcaccaagggccccagcgtgttccccctggcccccagcagcaagagcaccagcggcggcacagccgccctgggctgcctggtgaaggactacttccccgaaccggtgaccgtgtcctggaacagcggagccctgaccagcggcgtgcacaccttccccgccgtgctgcagagcagcggcctgtacagcctgagcagcgtggtgaccgtgcccagcagcagcctgggcacccagacctacatctgtaacgtgaaccacaagcccagcaacaccaaggtggacaagaaggtggagcccaagagctgtgacaagacccacacctgccccccctgccctgcccccgagctgctgggaggccccagcgtgttcctgttcccccccaagcctaaggacaccctgatgatcagcagaacccccgaggtgacctgtgtggtggtggatgtgagccacgaggaccctgaggtgaagttcaactggtacgtggacggcgtggaggtgcacaatgccaagaccaagcccagggaggagcagtacaacagcacctaccgggtggtgtccgtgctgaccgtgctgcaccaggattggctgaacggcaaggagtacaagtgtaaggtgtccaacaaggccctgcctgcccctatcgagaaaaccatcagcaaggccaagggccagcccagagagccccaggtgtacaccctgccccctagcagagatgagctgaccaagaaccaggtgtccctgacctgcctggtgaagggcttctaccccagcgacatcgccgtggagtgggagagcaacggccagcccgagaacaactacaagaccaccccccctgtgctggacagcgatggcagcttcttcctgtacagcaagctgaccgtggacaagagcagatggcagcagggcaacgtgttcagctgctccgtgatgcacgaggccctgcacaatcactacacccagaagagcctgagcctgtcccctggcaagggcgtgcagctcctggagagcggcggaggcctggtccagcccggcggcagcctgaggctgagctgcgccgccagcggcttcaccttcgcctggtatgatatgggctgggtgaggcaggcccccggcaagggcctggagtgggtgtccagcatcgactggcacggggaggtgacctactacgccgacagcgtgaagggcaggttcaccatcagcagggacaacagcaagaacaccctgtacctgcagatgaacagcctgagggccgaggacaccgcagtgtactactgcgccaccgccgaggacgaacccggctacgactactggggccagggcaccctggtgactgtgagcagc

SEQ ID NO: 224 - DNA, 1725 bp, Artificial Sequence
  Humanised
caggtgaccctgagggagagcggccccgccctggtgaagcccacccagaccctgaccctgacctgcaccttcagcggctttagcctcagcacctccggcatgggcgtgagctggatcaggcagccacccggcaaaggcctggagtggctggcccacatctactgggacgacgacaagaggtacaaccccagcctgaagagccggctgaccatcagcaaggataccagcaggaaccaggtggtgctgaccatgaccaacatggaccccgtggacaccgctacctactactgcgccaggagggagaccgtcttctactggtacttcgacgtgtggggaaggggcacactagtgaccgtgtccagcgccagcaccaagggccccagcgtgttccccctggcccccagcagcaagagcaccagcggcggcacagccgccctgggctgcctggtgaaggactacttccccgaaccggtgaccgtgtcctggaacagcggagccctgaccagcggcgtgcacaccttccccgccgtgctgcagagcagcggcctgtacagcctgagcagcgtggtgaccgtgcccagcagcagcctgggcacccagacctacatctgtaacgtgaaccacaagcccagcaacaccaaggtggacaagaaggtggagcccaagagctgtgacaagacccacacctgccccccctgccctgcccccgagctgctgggaggccccagcgtgttcctgttcccccccaagcctaaggacaccctgatgatcagcagaacccccgaggtgacctgtgtggtggtggatgtgagccacgaggaccctgaggtgaagttcaactggtacgtggacggcgtggaggtgcacaatgccaagaccaagcccagggaggagcagtacaacagcacctaccgggtggtgtccgtgctgaccgtgctgcaccaggattggctgaacggcaaggagtacaagtgtaaggtgtccaacaaggccctgcctgcccctatcgagaaaaccatcagcaaggccaagggccagcccagagagccccaggtgtacaccctgccccctagcagagatgagctgaccaagaaccaggtgtccctgacctgcctggtgaagggcttctaccccagcgacatcgccgtggagtgggagagcaacggccagcccgagaacaactacaagaccaccccccctgtgctggacagcgatggcagcttcttcctgtacagcaagctgaccgtggacaagagcagatggcagcagggcaacgtgttcagctgctccgtgatgcacgaggccctgcacaatcactacacccagaagagcctgagcctgtcccctggcaagaccgtggccgccccctcgggcgtgcagctcctggagagcggcggaggcctggtccagcccggcggcagcctgaggctgagctgcgccgccagcggcttcaccttcgcctggtatgatatgggctgggtgaggcaggcccccggcaagggcctggagtgggtgtccagcatcgactggcacggggaggtgacctactacgccgacagcgtgaagggcaggttcaccatcagcagggacaacagcaagaacaccctgtacctgcagatgaacagcctgagggccgaggacaccgcagtgtactactgcgccaccgccgaggacgaacccggctacgactactggggccagggcaccctggtgactgtgagcagc

SEQ ID NO: 225 - DNA, 1734 bp, Artificial Sequence
  Humanised
caggtgaccctgagggagagcggccccgccctggtgaagcccacccagaccctgaccctgacctgcaccttcagcggctttagcctcagcacctccggcatgggcgtgagctggatcaggcagccacccggcaaaggcctggagtggctggcccacatctactgggacgacgacaagaggtacaaccccagcctgaagagccggctgaccatcagcaaggataccagcaggaaccaggtggtgctgaccatgaccaacatggaccccgtggacaccgctacctactactgcgccaggagggagaccgtcttctactggtacttcgacgtgtggggaaggggcacactagtgaccgtgtccagcgccagcaccaagggccccagcgtgttccccctggcccccagcagcaagagcaccagcggcggcacagccgccctgggctgcctggtgaaggactacttccccgaaccggtgaccgtgtcctggaacagcggagccctgaccagcggcgtgcacaccttccccgccgtgctgcagagcagcggcctgtacagcctgagcagcgtggtgaccgtgcccagcagcagcctgggcacccagacctacatctgtaacgtgaaccacaagcccagcaacaccaaggtggacaagaaggtggagcccaagagctgtgacaagacccacacctgccccccctgccctgcccccgagctgctgggaggccccagcgtgttcctgttcccccccaagcctaaggacaccctgatgatcagcagaacccccgaggtgacctgtgtggtggtggatgtgagccacgaggaccctgaggtgaagttcaactggtacgtggacggcgtggaggtgcacaatgccaagaccaagcccagggaggagcagtacaacagcacctaccgggtggtgtccgtgctgaccgtgctgcaccaggattggctgaacggcaaggagtacaagtgtaaggtgtccaacaaggccctgcctgcccctatcgagaaaaccatcagcaaggccaagggccagcccagagagccccaggtgtacaccctgccccctagcagagatgagctgaccaagaaccaggtgtccctgacctgcctggtgaagggcttctaccccagcgacatcgccgtggagtgggagagcaacggccagcccgagaacaactacaagaccaccccccctgtgctggacagcgatggcagcttcttcctgtacagcaagctgaccgtggacaagagcagatggcagcagggcaacgtgttcagctgctccgtgatgcacgaggccctgcacaatcactacacccagaagagcctgagcctgtcccctggcaagggatcagccagcaccaagggccccacgggcgtgcagctcctggagagcggcggaggcctggtccagcccggcggcagcctgaggctgagctgcgccgccagcggcttcaccttcgcctggtatgatatgggctgggtgaggcaggcccccggcaagggcctggagtgggtgtccagcatcgactggcacggggaggtgacctactacgccgacagcgtgaagggcaggttcaccatcagcagggacaacagcaagaacaccctgtacctgcagatgaacagcctgagggccgaggacaccgcagtgtactactgcgccaccgccgaggacgaacccggctacgactactggggccagggcaccctggtgactgtgagcagc

SEQ ID NO: 226 - DNA, 1731 bp, Artificial Sequence
  Humanised
caggtgcagctggtgcagagcggagccgaggtgaagaagcctggcgccagcgtcaaggtgtcctgcaaggccagcggctacaccttcaccgactactacatgaactgggtgcggcaggccccaggccagggactggaatggatgggcaacatcaaccccaacaacggcggcaccaactacaaccagaagttcaaggaccgggtcaccatgaccaccgacaccagcaccagcaccgcctacatggaactgcggagcctgagaagcgacgacaccgccgtgtactactgcgcccggtggatcctgtactacggccggtccaagtggtacttcgacgtgtggggcaggggcacactagtgaccgtgtccagcgccagcaccaagggccccagcgtgttccccctggcccccagcagcaagagcaccagcggcggcacagccgccctgggctgcctggtgaaggactacttccccgaaccggtgaccgtgtcctggaacagcggagccctgaccagcggcgtgcacaccttccccgccgtgctgcagagcagcggcctgtacagcctgagcagcgtggtgaccgtgcccagcagcagcctgggcacccagacctacatctgtaacgtgaaccacaagcccagcaacaccaaggtggacaagaaggtggagcccaagagctgtgacaagacccacacctgccccccctgccctgcccccgagctgctgggaggccccagcgtgttcctgttcccccccaagcctaaggacaccctgatgatcagcagaacccccgaggtgacctgtgtggtggtggatgtgagccacgaggaccctgaggtgaagttcaactggtacgtggacggcgtggaggtgcacaatgccaagaccaagcccagggaggagcagtacaacagcacctaccgggtggtgtccgtgctgaccgtgctgcaccaggattggctgaacggcaaggagtacaagtgtaaggtgtccaacaaggccctgcctgcccctatcgagaaaaccatcagcaaggccaagggccagcccagagagccccaggtgtacaccctgccccctagcagagatgagctgaccaagaaccaggtgtccctgacctgcctggtgaagggcttctaccccagcgacatcgccgtggagtgggagagcaacggccagcccgagaacaactacaagaccaccccccctgtgctggacagcgatggcagcttcttcctgtacagcaagctgaccgtggacaagagcagatggcagcagggcaacgtgttcagctgctccgtgatgcacgaggccctgcacaatcactacacccagaagagcctgagcctgtcccctggcaagaccgtggccgccccctcgggatccgaggtgcagctcctggtcagcggcggcggcctggtccagcccggaggctcactgaggctgagctgcgccgctagcggcttcaccttcaaggcctaccccatgatgtgggtcaggcaggcccccggcaaaggcctggagtgggtgtctgagatcagccccagcggcagctacacctactacgccgacagcgtgaagggcaggttcaccatcagcagggacaacagcaagaacaccctgtacctgcagatgaactctctgagggccgaggacaccgccgtgtactactgcgccaaggaccccaggaagctggactattggggccagggcactctggtgaccgtgagcagc

SEQ ID NO: 227 - DNA, 1713 bp, Artificial Sequence
  Humanised
caggtgcagctggtgcagagcggagccgaggtgaagaagcctggcgccagcgtcaaggtgtcctgcaaggccagcggctacaccttcaccgactactacatgaactgggtgcggcaggccccaggccagggactggaatggatgggcaacatcaaccccaacaacggcggcaccaactacaaccagaagttcaaggaccgggtcaccatgaccaccgacaccagcaccagcaccgcctacatggaactgcggagcctgagaagcgacgacaccgccgtgtactactgcgcccggtggatcctgtactacggccggtccaagtggtacttcgacgtgtggggcaggggcacactagtgaccgtgtccagcgccagcaccaagggccccagcgtgttccccctggcccccagcagcaagagcaccagcggcggcacagccgccctgggctgcctggtgaaggactacttccccgaaccggtgaccgtgtcctggaacagcggagccctgaccagcggcgtgcacaccttccccgccgtgctgcagagcagcggcctgtacagcctgagcagcgtggtgaccgtgcccagcagcagcctgggcacccagacctacatctgtaacgtgaaccacaagcccagcaacaccaaggtggacaagaaggtggagcccaagagctgtgacaagacccacacctgccccccctgccctgcccccgagctgctgggaggccccagcgtgttcctgttcccccccaagcctaaggacaccctgatgatcagcagaacccccgaggtgacctgtgtggtggtggatgtgagccacgaggaccctgaggtgaagttcaactggtacgtggacggcgtggaggtgcacaatgccaagaccaagcccagggaggagcagtacaacagcacctaccgggtggtgtccgtgctgaccgtgctgcaccaggattggctgaacggcaaggagtacaagtgtaaggtgtccaacaaggccctgcctgcccctatcgagaaaaccatcagcaaggccaagggccagcccagagagccccaggtgtacaccctgccccctagcagagatgagctgaccaagaaccaggtgtccctgacctgcctggtgaagggcttctaccccagcgacatcgccgtggagtgggagagcaacggccagcccgagaacaactacaagaccaccccccctgtgctggacagcgatggcagcttcttcctgtacagcaagctgaccgtggacaagagcagatggcagcagggcaacgtgttcagctgctccgtgatgcacgaggccctgcacaatcactacacccagaagagcctgagcctgtcccctggcaagggatccgaggtgcagctcctggtcagcggcggcggcctggtccagcccggaggctcactgaggctgagctgcgccgctagcggcttcaccttcaaggcctaccccatgatgtgggtcaggcaggcccccggcaaaggcctggagtgggtgtctgagatcagccccagcggcagctacacctactacgccgacagcgtgaagggcaggttcaccatcagcagggacaacagcaagaacaccctgtacctgcagatgaactctctgagggccgaggacaccgccgtgtactactgcgccaaggaccccaggaagctggactattggggccagggcactctggtgaccgtgagcagc

SEQ ID NO: 228 - DNA, 1359 bp, Artificial Sequence
  Humanised
caggtgcagctggtgcagagcggagccgaggtgaagaagcctggcgccagcgtcaaggtgtcctgcaaggccagcggctacaccttcaccgactactacatgaactgggtgcggcaggccccaggccagggactggaatggatgggcaacatcaaccccaacaacggcggcaccaactacaaccagaagttcaaggaccgggtcaccatgaccaccgacaccagcaccagcaccgcctacatggaactgcggagcctgagaagcgacgacaccgccgtgtactactgcgcccggtggatcctgtactacggccggtccaagtggtacttcgacgtgtggggcaggggcacactagtgaccgtgtccagcgccagcaccaagggccccagcgtgttccccctggcccccagcagcaagagcaccagcggcggcacagccgccctgggctgcctggtgaaggactacttccccgaaccggtgaccgtgtcctggaacagcggagccctgaccagcggcgtgcacaccttccccgccgtgctgcagagcagcggcctgtacagcctgagcagcgtggtgaccgtgcccagcagcagcctgggcacccagacctacatctgtaacgtgaaccacaagcccagcaacaccaaggtggacaagaaggtggagcccaagagctgtgacaagacccacacctgccccccctgccctgcccccgagctgctgggaggccccagcgtgttcctgttcccccccaagcctaaggacaccctgatgatcagcagaacccccgaggtgacctgtgtggtggtggatgtgagccacgaggaccctgaggtgaagttcaactggtacgtggacggcgtggaggtgcacaatgccaagaccaagcccagggaggagcagtacaacagcacctaccgggtggtgtccgtgctgaccgtgctgcaccaggattggctgaacggcaaggagtacaagtgtaaggtgtccaacaaggccctgcctgcccctatcgagaaaaccatcagcaaggccaagggccagcccagagagccccaggtgtacaccctgccccctagcagagatgagctgaccaagaaccaggtgtccctgacctgcctggtgaagggcttctaccccagcgacatcgccgtggagtgggagagcaacggccagcccgagaacaactacaagaccaccccccctgtgctggacagcgatggcagcttcttcctgtacagcaagctgaccgtggacaagagcagatggcagcagggcaacgtgttcagctgctccgtgatgcacgaggccctgcacaatcactacacccagaagagcctgagcctgtcccctggcaag

SEQ ID NO: 229 - DNA, 1029 bp, Artificial Sequence
  Humanised
gacatcgtgatgacccagagccccctgagcctgcccgtgacccctggcgagcccgccagcatcagctgcagaagcagccagagcatcgtccagagcaacggcgacacctacctggaatggtatctgcagaagcccggccagtccccccagctgctgatctacagagtgagcaaccggttcagcggcgtgcccgacagattcagcggcagcggctccggcaccgacttcaccctgaagatcagccgggtggaggccgaggacgtgggcgtgtactactgctttcaaggcagccacgtgccctacaccttcggccagggcaccaagctggaaatcaagcgtacggtggccgcccccagcgtgttcatcttcccccccagcgatgagcagctgaagagcggcaccgccagcgtggtgtgtctgctgaacaacttctacccccgggaggccaaggtgcagtggaaggtggacaatgccctgcagagcggcaacagccaggagagcgtgaccgagcaggacagcaaggactccacctacagcctgagcagcaccctgaccctgagcaaggccgactacgagaagcacaaggtgtacgcctgtgaggtgacccaccagggcctgtccagccccgtgaccaagagcttcaaccggggcgagtgcaccgtggccgccccctcgggatccgaggtgcagctcctggtcagcggcggcggcctggtccagcccggaggctcactgaggctgagctgcgccgctagcggcttcaccttcaaggcctaccccatgatgtgggtcaggcaggcccccggcaaaggcctggagtgggtgtctgagatcagccccagcggcagctacacctactacgccgacagcgtgaagggcaggttcaccatcagcagggacaacagcaagaacaccctgtacctgcagatgaactctctgagggccgaggacaccgccgtgtactactgcgccaaggaccccaggaagctggactattggggccagggcactctggtgaccgtgagcagc

SEQ ID NO: 230 - DNA, 1011 bp, Artificial Sequence
  Humanised
gacatcgtgatgacccagagccccctgagcctgcccgtgacccctggcgagcccgccagcatcagctgcagaagcagccagagcatcgtccagagcaacggcgacacctacctggaatggtatctgcagaagcccggccagtccccccagctgctgatctacagagtgagcaaccggttcagcggcgtgcccgacagattcagcggcagcggctccggcaccgacttcaccctgaagatcagccgggtggaggccgaggacgtgggcgtgtactactgctttcaaggcagccacgtgccctacaccttcggccagggcaccaagctggaaatcaagcgtacggtggccgcccccagcgtgttcatcttcccccccagcgatgagcagctgaagagcggcaccgccagcgtggtgtgtctgctgaacaacttctacccccgggaggccaaggtgcagtggaaggtggacaatgccctgcagagcggcaacagccaggagagcgtgaccgagcaggacagcaaggactccacctacagcctgagcagcaccctgaccctgagcaaggccgactacgagaagcacaaggtgtacgcctgtgaggtgacccaccagggcctgtccagccccgtgaccaagagcttcaaccggggcgagtgtggatccgaggtgcagctcctggtcagcggcggcggcctggtccagcccggaggctcactgaggctgagctgcgccgctagcggcttcaccttcaaggcctaccccatgatgtgggtcaggcaggcccccggcaaaggcctggagtgggtgtctgagatcagccccagcggcagctacacctactacgccgacagcgtgaagggcaggttcaccatcagcagggacaacagcaagaacaccctgtacctgcagatgaactctctgagggccgaggacaccgccgtgtactactgcgccaaggaccccaggaagctggactattggggccagggcactctggtgaccgtgagcagc

SEQ ID NO: 231 - DNA, 657 bp, Artificial Sequence
  Humanised
gacatcgtgatgacccagagccccctgagcctgcccgtgacccctggcgagcccgccagcatcagctgcagaagcagccagagcatcgtccagagcaacggcgacacctacctggaatggtatctgcagaagcccggccagtccccccagctgctgatctacagagtgagcaaccggttcagcggcgtgcccgacagattcagcggcagcggctccggcaccgacttcaccctgaagatcagccgggtggaggccgaggacgtgggcgtgtactactgctttcaaggcagccacgtgccctacaccttcggccagggcaccaagctggaaatcaagcgtacggtggccgcccccagcgtgttcatcttcccccccagcgatgagcagctgaagagcggcaccgccagcgtggtgtgtctgctgaacaacttctacccccgggaggccaaggtgcagtggaaggtggacaatgccctgcagagcggcaacagccaggagagcgtgaccgagcaggacagcaaggactccacctacagcctgagcagcaccctgaccctgagcaaggccgactacgagaagcacaaggtgtacgcctgtgaggtgacccaccagggcctgtccagccccgtgaccaagagcttcaaccggggcgagtgc

SEQ ID NO: 232 - DNA, 1821 bp, Artificial Sequence
  Humanised
caggtgcagctggtgcagagcggagccgaggtgaagaagcctggcgccagcgtcaaggtgtcctgcaaggccagcggctacaccttcaccgactactacatgaactgggtgcggcaggccccaggccagggactggaatggatgggcaacatcaaccccaacaacggcggcaccaactacaaccagaagttcaaggaccgggtcaccatgaccaccgacaccagcaccagcaccgcctacatggaactgcggagcctgagaagcgacgacaccgccgtgtactactgcgcccggtggatcctgtactacggccggtccaagtggtacttcgacgtgtggggcaggggcacactagtgaccgtgtccagcgccagcaccaagggccccagcgtgttccccctggcccccagcagcaagagcaccagcggcggcacagccgccctgggctgcctggtgaaggactacttccccgaaccggtgaccgtgtcctggaacagcggagccctgaccagcggcgtgcacaccttccccgccgtgctgcagagcagcggcctgtacagcctgagcagcgtggtgaccgtgcccagcagcagcctgggcacccagacctacatctgtaacgtgaaccacaagcccagcaacaccaaggtggacaagaaggtggagcccaagagctgtgacaagacccacacctgccccccctgccctgcccccgagctgctgggaggccccagcgtgttcctgttcccccccaagcctaaggacaccctgatgatcagcagaacccccgaggtgacctgtgtggtggtggatgtgagccacgaggaccctgaggtgaagttcaactggtacgtggacggcgtggaggtgcacaatgccaagaccaagcccagggaggagcagtacaacagcacctaccgggtggtgtccgtgctgaccgtgctgcaccaggattggctgaacggcaaggagtacaagtgtaaggtgtccaacaaggccctgcctgcccctatcgagaaaaccatcagcaaggccaagggccagcccagagagccccaggtgtacaccctgccccctagcagagatgagctgaccaagaaccaggtgtccctgacctgcctggtgaagggcttctaccccagcgacatcgccgtggagtgggagagcaacggccagcccgagaacaactacaagaccaccccccctgtgctggacagcgatggcagcttcttcctgtacagcaagctgaccgtggacaagagcagatggcagcagggcaacgtgttcagctgctccgtgatgcacgaggccctgcacaatcactacacccagaagagcctgagcctgtcccctggcaagggatccgacggcggcggcattaggaggagcatgagcggcacctggtacctgaaggccatgaccgtggatagggagttccccgagatgaacctggagagcgtgacccccatgacactgaccctgctcaagggccacaacctggaggccaaggtcaccatgctgatctcaggcaggtgccaggaggtgaaggcagtgctgggcaggaccaaggagaggaagaagtacaccgccgacgggggcaagcacgtggcctatatcatccccagcgccgtgagggaccacgtgatcttctacagcgagggccagctccacggaaagcccgtgagaggcgtgaagctggtgggcagggaccccaagaacaacctggaggccctggaggacttcgaaaaagccgcaggcgccaggggcctgtccactgagagcatcctgatccctaggcagagcgagacctgcagccccggc

SEQ ID NO: 233 - DNA, 1623 bp, Artificial Sequence
  Humanised
caggtgcagctggtgcagagcggagccgaggtgaagaagcctggcgccagcgtcaaggtgtcctgcaaggccagcggctacaccttcaccgactactacatgaactgggtgcggcaggccccaggccagggactggaatggatgggcaacatcaaccccaacaacggcggcaccaactacaaccagaagttcaaggaccgggtcaccatgaccaccgacaccagcaccagcaccgcctacatggaactgcggagcctgagaagcgacgacaccgccgtgtactactgcgcccggtggatcctgtactacggccggtccaagtggtacttcgacgtgtggggcaggggcacactagtgaccgtgtccagcgccagcaccaagggccccagcgtgttccccctggcccccagcagcaagagcaccagcggcggcacagccgccctgggctgcctggtgaaggactacttccccgaaccggtgaccgtgtcctggaacagcggagccctgaccagcggcgtgcacaccttccccgccgtgctgcagagcagcggcctgtacagcctgagcagcgtggtgaccgtgcccagcagcagcctgggcacccagacctacatctgtaacgtgaaccacaagcccagcaacaccaaggtggacaagaaggtggagcccaagagctgtgacaagacccacacctgccccccctgccctgcccccgagctgctgggaggccccagcgtgttcctgttcccccccaagcctaaggacaccctgatgatcagcagaacccccgaggtgacctgtgtggtggtggatgtgagccacgaggaccctgaggtgaagttcaactggtacgtggacggcgtggaggtgcacaatgccaagaccaagcccagggaggagcagtacaacagcacctaccgggtggtgtccgtgctgaccgtgctgcaccaggattggctgaacggcaaggagtacaagtgtaaggtgtccaacaaggccctgcctgcccctatcgagaaaaccatcagcaaggccaagggccagcccagagagccccaggtgtacaccctgccccctagcagagatgagctgaccaagaaccaggtgtccctgacctgcctggtgaagggcttctaccccagcgacatcgccgtggagtgggagagcaacggccagcccgagaacaactacaagaccaccccccctgtgctggacagcgatggcagcttcttcctgtacagcaagctgaccgtggacaagagcagatggcagcagggcaacgtgttcagctgctccgtgatgcacgaggccctgcacaatcactacacccagaagagcctgagcctgtcccctggcaagggatccgaggtggtggccgccacccccaccagcctgctgatttcctggaggcacccccacttccccacacgctactacaggatcacctacggcgagaccggcggcaacagccccgtgcaggagttcaccgtgcccctgcagcctcccactgccaccatcagcggcctcaagcccggcgtggactacaccatcaccgtgtacgccgtcaccgacggaaggaacggcaggctgctgagcatccccatcagcatcaactacaggacc

SEQ ID NO: 234 - DNA, 1839 bp, Artificial Sequence
  Humanised
caggtgcagctggtgcagagcggagccgaggtgaagaagcctggcgccagcgtcaaggtgtcctgcaaggccagcggctacaccttcaccgactactacatgaactgggtgcggcaggccccaggccagggactggaatggatgggcaacatcaaccccaacaacggcggcaccaactacaaccagaagttcaaggaccgggtcaccatgaccaccgacaccagcaccagcaccgcctacatggaactgcggagcctgagaagcgacgacaccgccgtgtactactgcgcccggtggatcctgtactacggccggtccaagtggtacttcgacgtgtggggcaggggcacactagtgaccgtgtccagcgccagcaccaagggccccagcgtgttccccctggcccccagcagcaagagcaccagcggcggcacagccgccctgggctgcctggtgaaggactacttccccgaaccggtgaccgtgtcctggaacagcggagccctgaccagcggcgtgcacaccttccccgccgtgctgcagagcagcggcctgtacagcctgagcagcgtggtgaccgtgcccagcagcagcctgggcacccagacctacatctgtaacgtgaaccacaagcccagcaacaccaaggtggacaagaaggtggagcccaagagctgtgacaagacccacacctgccccccctgccctgcccccgagctgctgggaggccccagcgtgttcctgttcccccccaagcctaaggacaccctgatgatcagcagaacccccgaggtgacctgtgtggtggtggatgtgagccacgaggaccctgaggtgaagttcaactggtacgtggacggcgtggaggtgcacaatgccaagaccaagcccagggaggagcagtacaacagcacctaccgggtggtgtccgtgctgaccgtgctgcaccaggattggctgaacggcaaggagtacaagtgtaaggtgtccaacaaggccctgcctgcccctatcgagaaaaccatcagcaaggccaagggccagcccagagagccccaggtgtacaccctgccccctagcagagatgagctgaccaagaaccaggtgtccctgacctgcctggtgaagggcttctaccccagcgacatcgccgtggagtgggagagcaacggccagcccgagaacaactacaagaccaccccccctgtgctggacagcgatggcagcttcttcctgtacagcaagctgaccgtggacaagagcagatggcagcagggcaacgtgttcagctgctccgtgatgcacgaggccctgcacaatcactacacccagaagagcctgagcctgtcccctggcaagaccgtggccgccccctcgggatccgacggcggcggcattaggaggagcatgagcggcacctggtacctgaaggccatgaccgtggatagggagttccccgagatgaacctggagagcgtgacccccatgacactgaccctgctcaagggccacaacctggaggccaaggtcaccatgctgatctcaggcaggtgccaggaggtgaaggcagtgctgggcaggaccaaggagaggaagaagtacaccgccgacgggggcaagcacgtggcctatatcatccccagcgccgtgagggaccacgtgatcttctacagcgagggccagctccacggaaagcccgtgagaggcgtgaagctggtgggcagggaccccaagaacaacctggaggccctggaggacttcgaaaaagccgcaggcgccaggggcctgtccactgagagcatcctgatccctaggcagagcgagacctgcagccccggc

SEQ ID NO: 235 - DNA, 1539 bp, Artificial Sequence
  Humanised
caggtgcagctggtgcagagcggagccgaggtgaagaagcctggcgccagcgtcaaggtgtcctgcaaggccagcggctacaccttcaccgactactacatgaactgggtgcggcaggccccaggccagggactggaatggatgggcaacatcaaccccaacaacggcggcaccaactacaaccagaagttcaaggaccgggtcaccatgaccaccgacaccagcaccagcaccgcctacatggaactgcggagcctgagaagcgacgacaccgccgtgtactactgcgcccggtggatcctgtactacggccggtccaagtggtacttcgacgtgtggggcaggggcacactagtgaccgtgtccagcgccagcaccaagggccccagcgtgttccccctggcccccagcagcaagagcaccagcggcggcacagccgccctgggctgcctggtgaaggactacttccccgaaccggtgaccgtgtcctggaacagcggagccctgaccagcggcgtgcacaccttccccgccgtgctgcagagcagcggcctgtacagcctgagcagcgtggtgaccgtgcccagcagcagcctgggcacccagacctacatctgtaacgtgaaccacaagcccagcaacaccaaggtggacaagaaggtggagcccaagagctgtgacaagacccacacctgccccccctgccctgcccccgagctgctgggaggccccagcgtgttcctgttcccccccaagcctaaggacaccctgatgatcagcagaacccccgaggtgacctgtgtggtggtggatgtgagccacgaggaccctgaggtgaagttcaactggtacgtggacggcgtggaggtgcacaatgccaagaccaagcccagggaggagcagtacaacagcacctaccgggtggtgtccgtgctgaccgtgctgcaccaggattggctgaacggcaaggagtacaagtgtaaggtgtccaacaaggccctgcctgcccctatcgagaaaaccatcagcaaggccaagggccagcccagagagccccaggtgtacaccctgccccctagcagagatgagctgaccaagaaccaggtgtccctgacctgcctggtgaagggcttctaccccagcgacatcgccgtggagtgggagagcaacggccagcccgagaacaactacaagaccaccccccctgtgctggacagcgatggcagcttcttcctgtacagcaagctgaccgtggacaagagcagatggcagcagggcaacgtgttcagctgctccgtgatgcacgaggccctgcacaatcactacacccagaagagcctgagcctgtcccctggcaagggatccgtggacaacaagttcaacaaggagctgaggcaggcctactgggagatccaggccctgcccaatctgaactggacccagagcagggccttcatcaggagcctgtacgacgaccccagccagagcgctaacctcctggccgaggccaaaaagctgaacgacgcccaggcccccaag

SEQ ID NO: 236 - DNA, 1557 bp, Artificial Sequence
  Humanised
caggtgcagctggtgcagagcggagccgaggtgaagaagcctggcgccagcgtcaaggtgtcctgcaaggccagcggctacaccttcaccgactactacatgaactgggtgcggcaggccccaggccagggactggaatggatgggcaacatcaaccccaacaacggcggcaccaactacaaccagaagttcaaggaccgggtcaccatgaccaccgacaccagcaccagcaccgcctacatggaactgcggagcctgagaagcgacgacaccgccgtgtactactgcgcccggtggatcctgtactacggccggtccaagtggtacttcgacgtgtggggcaggggcacactagtgaccgtgtccagcgccagcaccaagggccccagcgtgttccccctggcccccagcagcaagagcaccagcggcggcacagccgccctgggctgcctggtgaaggactacttccccgaaccggtgaccgtgtcctggaacagcggagccctgaccagcggcgtgcacaccttccccgccgtgctgcagagcagcggcctgtacagcctgagcagcgtggtgaccgtgcccagcagcagcctgggcacccagacctacatctgtaacgtgaaccacaagcccagcaacaccaaggtggacaagaaggtggagcccaagagctgtgacaagacccacacctgccccccctgccctgcccccgagctgctgggaggccccagcgtgttcctgttcccccccaagcctaaggacaccctgatgatcagcagaacccccgaggtgacctgtgtggtggtggatgtgagccacgaggaccctgaggtgaagttcaactggtacgtggacggcgtggaggtgcacaatgccaagaccaagcccagggaggagcagtacaacagcacctaccgggtggtgtccgtgctgaccgtgctgcaccaggattggctgaacggcaaggagtacaagtgtaaggtgtccaacaaggccctgcctgcccctatcgagaaaaccatcagcaaggccaagggccagcccagagagccccaggtgtacaccctgccccctagcagagatgagctgaccaagaaccaggtgtccctgacctgcctggtgaagggcttctaccccagcgacatcgccgtggagtgggagagcaacggccagcccgagaacaactacaagaccaccccccctgtgctggacagcgatggcagcttcttcctgtacagcaagctgaccgtggacaagagcagatggcagcagggcaacgtgttcagctgctccgtgatgcacgaggccctgcacaatcactacacccagaagagcctgagcctgtcccctggcaagaccgtggccgccccctcgggatccgtggacaacaagttcaacaaggagctgaggcaggcctactgggagatccaggccctgcccaatctgaactggacccagagcagggccttcatcaggagcctgtacgacgaccccagccagagcgctaacctcctggccgaggccaaaaagctgaacgacgcccaggcccccaag

SEQ ID NO: 237 - DNA, 1734 bp, Artificial Sequence
  Humanised
caggtgcagctggtgcagagcggagccgaggtgaagaagcctggcgccagcgtcaaggtgtcctgcaaggccagcggctacaccttcaccgactactacatgaactgggtgcggcaggccccaggccagggactggaatggatgggcaacatcaaccccaacaacggcggcaccaactacaaccagaagttcaaggaccgggtcaccatgaccaccgacaccagcaccagcaccgcctacatggaactgcggagcctgagaagcgacgacaccgccgtgtactactgcgcccggtggatcctgtactacggccggtccaagtggtacttcgacgtgtggggcaggggcacactagtgaccgtgtccagcgccagcaccaagggccccagcgtgttccccctggcccccagcagcaagagcaccagcggcggcacagccgccctgggctgcctggtgaaggactacttccccgaaccggtgaccgtgtcctggaacagcggagccctgaccagcggcgtgcacaccttccccgccgtgctgcagagcagcggcctgtacagcctgagcagcgtggtgaccgtgcccagcagcagcctgggcacccagacctacatctgtaacgtgaaccacaagcccagcaacaccaaggtggacaagaaggtggagcccaagagctgtgacaagacccacacctgccccccctgccctgcccccgagctgctgggaggccccagcgtgttcctgttcccccccaagcctaaggacaccctgatgatcagcagaacccccgaggtgacctgtgtggtggtggatgtgagccacgaggaccctgaggtgaagttcaactggtacgtggacggcgtggaggtgcacaatgccaagaccaagcccagggaggagcagtacaacagcacctaccgggtggtgtccgtgctgaccgtgctgcaccaggattggctgaacggcaaggagtacaagtgtaaggtgtccaacaaggccctgcctgcccctatcgagaaaaccatcagcaaggccaagggccagcccagagagccccaggtgtacaccctgccccctagcagagatgagctgaccaagaaccaggtgtccctgacctgcctggtgaagggcttctaccccagcgacatcgccgtggagtgggagagcaacggccagcccgagaacaactacaagaccaccccccctgtgctggacagcgatggcagcttcttcctgtacagcaagctgaccgtggacaagagcagatggcagcagggcaacgtgttcagctgctccgtgatgcacgaggccctgcacaatcactacacccagaagagcctgagcctgtcccctggcaagggatccgacctggggaaaaagctgcttgaagccgctagggcaggacaggatgacgaggtgaggattctgatggcaaatggcgccgacgtcaatgccaaagacgagtacggcctcacccctctttatctggccactgcacacggacacttggagatcgtggaggtgctgctcaagaacggagctgatgtgaacgctgtggacgctattgggttcacaccccttcacctcgcagcctttattggccacctggagatcgccgaagttctcctgaaacacggcgcagacgtcaacgcacaggataagttcgggaagaccgccttcgacatcagcatcggcaatgggaacgaggatctggccgagatcctgcagaagctg

SEQ ID NO: 238 - DNA, 1752 bp, Artificial Sequence
  Humanised
caggtgcagctggtgcagagcggagccgaggtgaagaagcctggcgccagcgtcaaggtgtcctgcaaggccagcggctacaccttcaccgactactacatgaactgggtgcggcaggccccaggccagggactggaatggatgggcaacatcaaccccaacaacggcggcaccaactacaaccagaagttcaaggaccgggtcaccatgaccaccgacaccagcaccagcaccgcctacatggaactgcggagcctgagaagcgacgacaccgccgtgtactactgcgcccggtggatcctgtactacggccggtccaagtggtacttcgacgtgtggggcaggggcacactagtgaccgtgtccagcgccagcaccaagggccccagcgtgttccccctggcccccagcagcaagagcaccagcggcggcacagccgccctgggctgcctggtgaaggactacttccccgaaccggtgaccgtgtcctggaacagcggagccctgaccagcggcgtgcacaccttccccgccgtgctgcagagcagcggcctgtacagcctgagcagcgtggtgaccgtgcccagcagcagcctgggcacccagacctacatctgtaacgtgaaccacaagcccagcaacaccaaggtggacaagaaggtggagcccaagagctgtgacaagacccacacctgccccccctgccctgcccccgagctgctgggaggccccagcgtgttcctgttcccccccaagcctaaggacaccctgatgatcagcagaacccccgaggtgacctgtgtggtggtggatgtgagccacgaggaccctgaggtgaagttcaactggtacgtggacggcgtggaggtgcacaatgccaagaccaagcccagggaggagcagtacaacagcacctaccgggtggtgtccgtgctgaccgtgctgcaccaggattggctgaacggcaaggagtacaagtgtaaggtgtccaacaaggccctgcctgcccctatcgagaaaaccatcagcaaggccaagggccagcccagagagccccaggtgtacaccctgccccctagcagagatgagctgaccaagaaccaggtgtccctgacctgcctggtgaagggcttctaccccagcgacatcgccgtggagtgggagagcaacggccagcccgagaacaactacaagaccaccccccctgtgctggacagcgatggcagcttcttcctgtacagcaagctgaccgtggacaagagcagatggcagcagggcaacgtgttcagctgctccgtgatgcacgaggccctgcacaatcactacacccagaagagcctgagcctgtcccctggcaagaccgtggccgccccctcgggatccgacctggggaaaaagctgcttgaagccgctagggcaggacaggatgacgaggtgaggattctgatggcaaatggcgccgacgtcaatgccaaagacgagtacggcctcacccctctttatctggccactgcacacggacacttggagatcgtggaggtgctgctcaagaacggagctgatgtgaacgctgtggacgctattgggttcacaccccttcacctcgcagcctttattggccacctggagatcgccgaagttctcctgaaacacggcgcagacgtcaacgcacaggataagttcgggaagaccgccttcgacatcagcatcggcaatgggaacgaggatctggccgagatcctgcagaagctg

SEQ ID NO: 239 - DNA, 1722 bp, Artificial Sequence
  Humanised
caggtgaccctgagggagagcggccccgccctggtgaagcccacccagaccctgaccctgacctgcaccttcagcggctttagcctcagcacctccggcatgggcgtgagctggatcaggcagccacccggcaaaggcctggagtggctggcccacatctactgggacgacgacaagaggtacaaccccagcctgaagagccggctgaccatcagcaaggataccagcaggaaccaggtggtgctgaccatgaccaacatggaccccgtggacaccgctacctactactgcgccaggagggagaccgtcttctactggtacttcgacgtgtggggaaggggcacactagtgaccgtgtccagcgccagcaccaagggccccagcgtgttccccctggcccccagcagcaagagcaccagcggcggcacagccgccctgggctgcctggtgaaggactacttccccgaaccggtgaccgtgtcctggaacagcggagccctgaccagcggcgtgcacaccttccccgccgtgctgcagagcagcggcctgtacagcctgagcagcgtggtgaccgtgcccagcagcagcctgggcacccagacctacatctgtaacgtgaaccacaagcccagcaacaccaaggtggacaagaaggtggagcccaagagctgtgacaagacccacacctgccccccctgccctgcccccgagctgctgggaggccccagcgtgttcctgttcccccccaagcctaaggacaccctgatgatcagcagaacccccgaggtgacctgtgtggtggtggatgtgagccacgaggaccctgaggtgaagttcaactggtacgtggacggcgtggaggtgcacaatgccaagaccaagcccagggaggagcagtacaacagcacctaccgggtggtgtccgtgctgaccgtgctgcaccaggattggctgaacggcaaggagtacaagtgtaaggtgtccaacaaggccctgcctgcccctatcgagaaaaccatcagcaaggccaagggccagcccagagagccccaggtgtacaccctgccccctagcagagatgagctgaccaagaaccaggtgtccctgacctgcctggtgaagggcttctaccccagcgacatcgccgtggagtgggagagcaacggccagcccgagaacaactacaagaccaccccccctgtgctggacagcgatggcagcttcttcctgtacagcaagctgaccgtggacaagagcagatggcagcagggcaacgtgttcagctgctccgtgatgcacgaggccctgcacaatcactacacccagaagagcctgagcctgtcccctggcaagggatcccaggtgcagctggtggagtctgggggaggcttggtgcaggctggggggtctctgagactctcctgtgcagcctctggatacgcatacacttacatctacatgggctggttccgccaggctccagggaaagagcgtgagggggtcgcagctatggatagtggtggtggtggcacactctacgccgactccgtgaagggccgattcaccatctcccgcgacaaaggcaagaacacggtgtatctgcaaatggacagcctgaaacctgaggacacggccacgtattactgtgctgcaggtggctacgagctgcgtgaccggacatatgggcagtggggccaggggacccaggtcaccgtctcctca

SEQ ID NO: 240 - DNA, 1698 bp, Artificial Sequence
  Humanised
caggtgaccctgagggagagcggccccgccctggtgaagcccacccagaccctgaccctgacctgcaccttcagcggctttagcctcagcacctccggcatgggcgtgagctggatcaggcagccacccggcaaaggcctggagtggctggcccacatctactgggacgacgacaagaggtacaaccccagcctgaagagccggctgaccatcagcaaggataccagcaggaaccaggtggtgctgaccatgaccaacatggaccccgtggacaccgctacctactactgcgccaggagggagaccgtcttctactggtacttcgacgtgtggggaaggggcacactagtgaccgtgtccagcgccagcaccaagggccccagcgtgttccccctggcccccagcagcaagagcaccagcggcggcacagccgccctgggctgcctggtgaaggactacttccccgaaccggtgaccgtgtcctggaacagcggagccctgaccagcggcgtgcacaccttccccgccgtgctgcagagcagcggcctgtacagcctgagcagcgtggtgaccgtgcccagcagcagcctgggcacccagacctacatctgtaacgtgaaccacaagcccagcaacaccaaggtggacaagaaggtggagcccaagagctgtgacaagacccacacctgccccccctgccctgcccccgagctgctgggaggccccagcgtgttcctgttcccccccaagcctaaggacaccctgatgatcagcagaacccccgaggtgacctgtgtggtggtggatgtgagccacgaggaccctgaggtgaagttcaactggtacgtggacggcgtggaggtgcacaatgccaagaccaagcccagggaggagcagtacaacagcacctaccgggtggtgtccgtgctgaccgtgctgcaccaggattggctgaacggcaaggagtacaagtgtaaggtgtccaacaaggccctgcctgcccctatcgagaaaaccatcagcaaggccaagggccagcccagagagccccaggtgtacaccctgccccctagcagagatgagctgaccaagaaccaggtgtccctgacctgcctggtgaagggcttctaccccagcgacatcgccgtggagtgggagagcaacggccagcccgagaacaactacaagaccaccccccctgtgctggacagcgatggcagcttcttcctgtacagcaagctgaccgtggacaagagcagatggcagcagggcaacgtgttcagctgctccgtgatgcacgaggccctgcacaatcactacacccagaagagcctgagcctgtcccctggcaagggatccgcgcgcgtcgaccagacgccgcgcagcgtcacgaaggaaaccggcgagtccctcaccatcaactgcgtgctgcgggatgcctcctacgccctgggcagcacatgttggtacagaaagaagagcggggaaggcaacgaggagtccatctccaaggggggaagatacgtcgagaccgtgaacagcggaagcaagagcttcagcctgcggatcaacgacctcaccgtcgaggacgggggcacctaccgttgcggtctgggcgtggccggcggctattgcgattacgccctgtgcagtagccggtatgctgagtgcggcgacggcaccgctgtgaccgtgaac

SEQ ID NO: 241 - DNA, 1641 bp, Artificial Sequence
  Humanised
caggtgcagctggtgcagagcggagccgaggtgaagaagcctggcgccagcgtcaaggtgtcctgcaaggccagcggctacaccttcaccgactactacatgaactgggtgcggcaggccccaggccagggactggaatggatgggcaacatcaaccccaacaacggcggcaccaactacaaccagaagttcaaggaccgggtcaccatgaccaccgacaccagcaccagcaccgcctacatggaactgcggagcctgagaagcgacgacaccgccgtgtactactgcgcccggtggatcctgtactacggccggtccaagtggtacttcgacgtgtggggcaggggcacactagtgaccgtgtccagcgccagcaccaagggccccagcgtgttccccctggcccccagcagcaagagcaccagcggcggcacagccgccctgggctgcctggtgaaggactacttccccgaaccggtgaccgtgtcctggaacagcggagccctgaccagcggcgtgcacaccttccccgccgtgctgcagagcagcggcctgtacagcctgagcagcgtggtgaccgtgcccagcagcagcctgggcacccagacctacatctgtaacgtgaaccacaagcccagcaacaccaaggtggacaagaaggtggagcccaagagctgtgacaagacccacacctgccccccctgccctgcccccgagctgctgggaggccccagcgtgttcctgttcccccccaagcctaaggacaccctgatgatcagcagaacccccgaggtgacctgtgtggtggtggatgtgagccacgaggaccctgaggtgaagttcaactggtacgtggacggcgtggaggtgcacaatgccaagaccaagcccagggaggagcagtacaacagcacctaccgggtggtgtccgtgctgaccgtgctgcaccaggattggctgaacggcaaggagtacaagtgtaaggtgtccaacaaggccctgcctgcccctatcgagaaaaccatcagcaaggccaagggccagcccagagagccccaggtgtacaccctgccccctagcagagatgagctgaccaagaaccaggtgtccctgacctgcctggtgaagggcttctaccccagcgacatcgccgtggagtgggagagcaacggccagcccgagaacaactacaagaccaccccccctgtgctggacagcgatggcagcttcttcctgtacagcaagctgaccgtggacaagagcagatggcagcagggcaacgtgttcagctgctccgtgatgcacgaggccctgcacaatcactacacccagaagagcctgagcctgtcccctggcaagaccgtggccgccccctcgggatccgaggtggtggccgccacccccaccagcctgctgatttcctggaggcacccccacttccccacacgctactacaggatcacctacggcgagaccggcggcaacagccccgtgcaggagttcaccgtgcccctgcagcctcccactgccaccatcagcggcctcaagcccggcgtggactacaccatcaccgtgtacgccgtcaccgacggaaggaacggcaggctgctgagcatccccatcagcatcaactacaggacc

SEQ ID NO: 242 - DNA, 1611 bp, Artificial Sequence
  Humanised
caggtgcagctgaagcagagcggccctggcctggtgcagccctctcagagcctgagcatcacctgtaccgtgagcggcttcagcctgaccaattacggcgtgcattgggtgcggcagtctccaggcaagggcctggaatggctgggagtgatctggtccggcggcaacaccgactacaacacccccttcaccagcagactgagcatcaacaaggacaacagcaagagccaggtgttcttcaagatgaacagcctgcagagcaacgacaccgccatctactattgtgccagggccctgacctactacgactacgagttcgcctactggggccagggcaccctggtgaccgtgagcgccgctagcaccaagggccccagcgtgttccccctggcccccagcagcaagagcaccagcggcggcacagccgccctgggctgcctggtgaaggactacttccccgagcctgtgaccgtgtcctggaatagcggagccctgacctccggcgtgcacaccttccccgccgtgctgcagagcagcggcctgtactccctgagcagcgtggtgaccgtgcccagcagcagcctgggcacccagacctacatctgcaacgtgaaccacaagcccagcaacaccaaagtggacaagaaagtggagcccaagagctgcgataagacccacacctgccccccctgccctgcccccgagctgctgggcggacctagcgtgttcctgttcccccccaagcctaaggacaccctgatgatcagcaggacccccgaagtgacctgcgtggtggtggatgtgagccacgaggaccctgaagtgaagttcaactggtacgtggacggcgtggaagtgcacaacgccaagaccaagcccagagaggagcagtacaacagcacctaccgcgtggtgtctgtgctgaccgtgctgcaccaggattggctgaacggcaaggagtacaagtgcaaagtgagcaacaaggccctgcctgcccctatcgagaaaaccatcagcaaggccaagggccagcctagagagccccaggtctacaccctgcctccctccagagatgagctgaccaagaaccaggtgtccctgacctgtctggtgaagggcttctaccccagcgacatcgccgtggagtgggagagcaacggccagcccgagaacaactacaagaccaccccccctgtgctggacagcgatggcagcttcttcctgtactccaagctgaccgtggacaagagcagatggcagcagggcaacgtgttcagctgcagcgtgatgcacgaggccctgcacaatcactacacccagaagagtctgagcctgtctcctggcaagagatccgaggtggtggccgccacccccaccagcctgctgatttcctggaggcacccccacttccccacacgctactacaggatcacctacggcgagaccggcggcaacagccccgtgcaggagttcaccgtgcccctgcagcctcccactgccaccatcagcggcctcaagcccggcgtggactacaccatcaccgtgtacgccgtcaccgacggaaggaacggcaggctgctgagcatccccatcagcatcaactacaggacc

SEQ ID NO: 243 - protein, 642 aa, Artificial Sequence
  Humanised
GACATCCTGCTGACCCAGAGCCCCGTGATCCTGAGCGTGAGCCCTGGCGAGAGAGTGAGCTTCAGCTGCCGGGCCAGCCAGAGCATCGGCACCAACATCCACTGGTATCAGCAGCGGACCAACGGCAGCCCCAGGCTGCTGATCAAGTACGCCAGCGAGTCCATCAGCGGCATCCCCAGCCGGTTCAGCGGCAGCGGCTCCGGCACCGACTTCACCCTGAGCATCAACAGCGTGGAGAGCGAGGATATCGCCGACTACTACTGCCAGCAGAACAACAACTGGCCCACCACCTTCGGAGCCGGCACCAAGCTGGAACTGAAGCGTACGGTGGCCGCCCCCAGCGTGTTCATCTTCCCCCCCAGCGATGAGCAGCTCAAGAGCGGCACCGCCAGCGTGGTGTGTCTGCTGAACAACTTCTACCCCCGGGAGGCCAAAGTGCAGTGGAAAGTGGACAACGCCCTGCAGAGCGGCAACAGCCAGGAGAGCGTGACCGAGCAGGACAGCAAGGACTCCACCTACAGCCTGAGCAGCACCCTGACCCTGAGCAAGGCCGACTACGAGAAGCACAAAGTGTACGCCTGCGAAGTGACCCACCAGGGCCTGTCCAGCCCCGTGACCAAGAGCTTCAACCGGGGCGAGTGC

SEQ ID NO: 244 - DNA, 906 bp, Artificial Sequence
  Humanised
gacatcctgctgacccagagccccgtgatcctgagcgtgagccctggcgagagagtgagcttcagctgccgggccagccagagcatcggcaccaacatccactggtatcagcagcggaccaacggcagccccaggctgctgatcaagtacgccagcgagtccatcagcggcatccccagccggttcagcggcagcggctccggcaccgacttcaccctgagcatcaacagcgtggagagcgaggatatcgccgactactactgccagcagaacaacaactggcccaccaccttcggagccggcaccaagctggaactgaagcgtacggtggccgcccccagcgtgttcatcttcccccccagcgatgagcagctcaagagcggcaccgccagcgtggtgtgtctgctgaacaacttctacccccgggaggccaaagtgcagtggaaagtggacaacgccctgcagagcggcaacagccaggagagcgtgaccgagcaggacagcaaggactccacctacagcctgagcagcaccctgaccctgagcaaggccgactacgagaagcacaaagtgtacgcctgcgaagtgacccaccagggcctgtccagccccgtgaccaagagcttcaaccgaggcgagtgcagatccgaggtggtggccgccacccccaccagcctgctgatttcctggaggcacccccacttccccacacgctactacaggatcacctacggcgagaccggcggcaacagccccgtgcaggagttcaccgtgcccctgcagcctcccactgccaccatcagcggcctcaagcccggcgtggactacaccatcaccgtgtacgccgtcaccgacggaaggaacggcaggctgctgagcatccccatcagcatcaactacaggacc

SEQ ID NO: 245 - DNA, 1347 bp, Artificial Sequence
  Humanised
caggtgcagctgaagcagagcggccctggcctggtgcagccctctcagagcctgagcatcacctgtaccgtgagcggcttcagcctgaccaattacggcgtgcattgggtgcggcagtctccaggcaagggcctggaatggctgggagtgatctggtccggcggcaacaccgactacaacacccccttcaccagcagactgagcatcaacaaggacaacagcaagagccaggtgttcttcaagatgaacagcctgcagagcaacgacaccgccatctactattgtgccagggccctgacctactacgactacgagttcgcctactggggccagggcaccctggtgaccgtgagcgccgctagcaccaagggccccagcgtgttccccctggcccccagcagcaagagcaccagcggcggcacagccgccctgggctgcctggtgaaggactacttccccgagcctgtgaccgtgtcctggaatagcggagccctgacctccggcgtgcacaccttccccgccgtgctgcagagcagcggcctgtactccctgagcagcgtggtgaccgtgcccagcagcagcctgggcacccagacctacatctgcaacgtgaaccacaagcccagcaacaccaaagtggacaagaaagtggagcccaagagctgcgataagacccacacctgccccccctgccctgcccccgagctgctgggcggacctagcgtgttcctgttcccccccaagcctaaggacaccctgatgatcagcaggacccccgaagtgacctgcgtggtggtggatgtgagccacgaggaccctgaagtgaagttcaactggtacgtggacggcgtggaagtgcacaacgccaagaccaagcccagagaggagcagtacaacagcacctaccgcgtggtgtctgtgctgaccgtgctgcaccaggattggctgaacggcaaggagtacaagtgcaaagtgagcaacaaggccctgcctgcccctatcgagaaaaccatcagcaaggccaagggccagcctagagagccccaggtctacaccctgcctccctccagagatgagctgaccaagaaccaggtgtccctgacctgtctggtgaagggcttctaccccagcgacatcgccgtggagtgggagagcaacggccagcccgagaacaactacaagaccaccccccctgtgctggacagcgatggcagcttcttcctgtactccaagctgaccgtggacaagagcagatggcagcagggcaacgtgttcagctgcagcgtgatgcacgaggccctgcacaatcactacacccagaagagtctgagcctgtcccctggcaag

SEQ ID NO: 246 - DNA, 1617 bp, Artificial Sequence
  Humanised
gaggtggtggccgccacccccaccagcctgctgatttcctggaggcacccccacttccccacacgctactacaggatcacctacggcgagaccggcggcaacagccccgtgcaggagttcaccgtgcccctgcagcctcccactgccaccatcagcggcctcaagcccggcgtggactacaccatcaccgtgtacgccgtcaccgacggaaggaacggcaggctgctgagcatccccatcagcatcaactacaggaccggatccaccggccaggtgcagctgaagcagagcggccctggcctggtgcagccctctcagagcctgagcatcacctgtaccgtgagcggcttcagcctgaccaattacggcgtgcattgggtgcggcagtctccaggcaagggcctggaatggctgggagtgatctggtccggcggcaacaccgactacaacacccccttcaccagcagactgagcatcaacaaggacaacagcaagagccaggtgttcttcaagatgaacagcctgcagagcaacgacaccgccatctactattgtgccagggccctgacctactacgactacgagttcgcctactggggccagggcaccctggtgaccgtgagcgccgctagcaccaagggccccagcgtgttccccctggcccccagcagcaagagcaccagcggcggcacagccgccctgggctgcctggtgaaggactacttccccgagcctgtgaccgtgtcctggaatagcggagccctgacctccggcgtgcacaccttccccgccgtgctgcagagcagcggcctgtactccctgagcagcgtggtgaccgtgcccagcagcagcctgggcacccagacctacatctgcaacgtgaaccacaagcccagcaacaccaaagtggacaagaaagtggagcccaagagctgcgataagacccacacctgccccccctgccctgcccccgagctgctgggcggacctagcgtgttcctgttcccccccaagcctaaggacaccctgatgatcagcaggacccccgaagtgacctgcgtggtggtggatgtgagccacgaggaccctgaagtgaagttcaactggtacgtggacggcgtggaagtgcacaacgccaagaccaagcccagagaggagcagtacaacagcacctaccgcgtggtgtctgtgctgaccgtgctgcaccaggattggctgaacggcaaggagtacaagtgcaaagtgagcaacaaggccctgcctgcccctatcgagaaaaccatcagcaaggccaagggccagcctagagagccccaggtctacaccctgcctccctccagagatgagctgaccaagaaccaggtgtccctgacctgtctggtgaagggcttctaccccagcgacatcgccgtggagtgggagagcaacggccagcccgagaacaactacaagaccaccccccctgtgctggacagcgatggcagcttcttcctgtactccaagctgaccgtggacaagagcagatggcagcagggcaacgtgttcagctgcagcgtgatgcacgaggccctgcacaatcactacacccagaagagtctgagcctgtcccctggcaag

SEQ ID NO: 247 - DNA, 909 bp, Artificial Sequence
  Humanised
gaggtggtggccgccacccccaccagcctgctgatttcctggaggcacccccacttccccacacgctactacaggatcacctacggcgagaccggcggcaacagccccgtgcaggagttcaccgtgcccctgcagcctcccactgccaccatcagcggcctcaagcccggcgtggactacaccatcaccgtgtacgccgtcaccgacggaaggaacggcaggctgctgagcatccccatcagcatcaactacaggacgtcgaccggtgacatcctgctgacccagagccccgtgatcctgagcgtgagccctggcgagagagtgagcttcagctgccgggccagccagagcatcggcaccaacatccactggtatcagcagcggaccaacggcagccccaggctgctgatcaagtacgccagcgagtccatcagcggcatccccagccggttcagcggcagcggctccggcaccgacttcaccctgagcatcaacagcgtggagagcgaggatatcgccgactactactgccagcagaacaacaactggcccaccaccttcggagccggcaccaagctggaactgaagcgtacggtggccgcccccagcgtgttcatcttcccccccagcgatgagcagctcaagagcggcaccgccagcgtggtgtgtctgctgaacaacttctacccccgggaggccaaagtgcagtggaaagtggacaacgccctgcagagcggcaacagccaggagagcgtgaccgagcaggacagcaaggactccacctacagcctgagcagcaccctgaccctgagcaaggccgactacgagaagcacaaagtgtacgcctgcgaagtgacccaccagggcctgtccagccccgtgaccaagagcttcaaccggggcgagtgc

SEQ ID NO: 248 - DNA, 1707 bp, Artificial Sequence
  Humanised
caggtgaccctgagggagagcggccccgccctggtgaagcccacccagaccctgaccctgacctgcaccttcagcggctttagcctcagcacctccggcatgggcgtgagctggatcaggcagccacccggcaaaggcctggagtggctggcccacatctactgggacgacgacaagaggtacaaccccagcctgaagagccggctgaccatcagcaaggataccagcaggaaccaggtggtgctgaccatgaccaacatggaccccgtggacaccgctacctactactgcgccaggagggagaccgtcttctactggtacttcgacgtgtggggaaggggcacactagtgaccgtgtccagcgccagcaccaagggccccagcgtgttccccctggcccccagcagcaagagcaccagcggcggcacagccgccctgggctgcctggtgaaggactacttccccgaaccggtgaccgtgtcctggaacagcggagccctgaccagcggcgtgcacaccttccccgccgtgctgcagagcagcggcctgtacagcctgagcagcgtggtgaccgtgcccagcagcagcctgggcacccagacctacatctgtaacgtgaaccacaagcccagcaacaccaaggtggacaagaaggtggagcccaagagctgtgacaagacccacacctgccccccctgccctgcccccgagctgctgggaggccccagcgtgttcctgttcccccccaagcctaaggacaccctgatgatcagcagaacccccgaggtgacctgtgtggtggtggatgtgagccacgaggaccctgaggtgaagttcaactggtacgtggacggcgtggaggtgcacaatgccaagaccaagcccagggaggagcagtacaacagcacctaccgggtggtgtccgtgctgaccgtgctgcaccaggattggctgaacggcaaggagtacaagtgtaaggtgtccaacaaggccctgcctgcccctatcgagaaaaccatcagcaaggccaagggccagcccagagagccccaggtgtacaccctgccccctagcagagatgagctgaccaagaaccaggtgtccctgacctgcctggtgaagggcttctaccccagcgacatcgccgtggagtgggagagcaacggccagcccgagaacaactacaagaccaccccccctgtgctggacagcgatggcagcttcttcctgtacagcaagctgaccgtggacaagagcagatggcagcagggcaacgtgttcagctgctccgtgatgcacgaggccctgcacaatcactacacccagaagagcctgagcctgtcccctggcaagggcgtgcagctcctggagagcggcggaggcctggtccagcccggcggcagcctgaggctgagctgcgccgccagcggcttcgtgttcccctggtatgatatgggctgggtgaggcaggcccccggcaagggcctggagtgggtgtccagcatcgactggcacgggaagatcacctactacgccgacagcgtgaagggcaggttcaccatcagcagggacaacagcaagaacaccctgtacctgcagatgaacagcctgagggccgaggacaccgcagtgtactactgcgccaccgccgaggacgaacccggctacgactactggggccagggcaccctggtgactgtgagcagc

SEQ ID NO: 249 - DNA, 1725 bp, Artificial Sequence
  Humanised
caggtgaccctgagggagagcggccccgccctggtgaagcccacccagaccctgaccctgacctgcaccttcagcggctttagcctcagcacctccggcatgggcgtgagctggatcaggcagccacccggcaaaggcctggagtggctggcccacatctactgggacgacgacaagaggtacaaccccagcctgaagagccggctgaccatcagcaaggataccagcaggaaccaggtggtgctgaccatgaccaacatggaccccgtggacaccgctacctactactgcgccaggagggagaccgtcttctactggtacttcgacgtgtggggaaggggcacactagtgaccgtgtccagcgccagcaccaagggccccagcgtgttccccctggcccccagcagcaagagcaccagcggcggcacagccgccctgggctgcctggtgaaggactacttccccgaaccggtgaccgtgtcctggaacagcggagccctgaccagcggcgtgcacaccttccccgccgtgctgcagagcagcggcctgtacagcctgagcagcgtggtgaccgtgcccagcagcagcctgggcacccagacctacatctgtaacgtgaaccacaagcccagcaacaccaaggtggacaagaaggtggagcccaagagctgtgacaagacccacacctgccccccctgccctgcccccgagctgctgggaggccccagcgtgttcctgttcccccccaagcctaaggacaccctgatgatcagcagaacccccgaggtgacctgtgtggtggtggatgtgagccacgaggaccctgaggtgaagttcaactggtacgtggacggcgtggaggtgcacaatgccaagaccaagcccagggaggagcagtacaacagcacctaccgggtggtgtccgtgctgaccgtgctgcaccaggattggctgaacggcaaggagtacaagtgtaaggtgtccaacaaggccctgcctgcccctatcgagaaaaccatcagcaaggccaagggccagcccagagagccccaggtgtacaccctgccccctagcagagatgagctgaccaagaaccaggtgtccctgacctgcctggtgaagggcttctaccccagcgacatcgccgtggagtgggagagcaacggccagcccgagaacaactacaagaccaccccccctgtgctggacagcgatggcagcttcttcctgtacagcaagctgaccgtggacaagagcagatggcagcagggcaacgtgttcagctgctccgtgatgcacgaggccctgcacaatcactacacccagaagagcctgagcctgtcccctggcaagaccgtggccgccccctcgggcgtgcagctcctggagagcggcggaggcctggtccagcccggcggcagcctgaggctgagctgcgccgccagcggcttcgtgttcccctggtatgatatgggctgggtgaggcaggcccccggcaagggcctggagtgggtgtccagcatcgactggcacgggaagatcacctactacgccgacagcgtgaagggcaggttcaccatcagcagggacaacagcaagaacaccctgtacctgcagatgaacagcctgagggccgaggacaccgcagtgtactactgcgccaccgccgaggacgaacccggctacgactactggggccagggcaccctggtgactgtgagcagc

SEQ ID NO: 250 - DNA, 1713 bp, Artificial Sequence
  Humanised
caggtgcagctcgtccagtctggggccgaggtgaagaagcccggagcttctgtgaaggtgtcctgcaaggccagcggctataccttcatcgactacgagatccattgggtgaggcaggctcccgggcagggcctggagtggatgggcgccatcgacccagagaccggaggcacggcgtacaaccagaagttcaagggacgggtcaccatgacaaccgataccagcacctccaccgcttacatggagctgcgcagcctgagaagcgacgacaccgcggtgtactactgtacgcgcatcctgctctactactaccccatggattactggggccagggcacactagtgaccgtgtctagcgccagcaccaagggccccagcgtgttccccctggcccccagcagcaagagcaccagcggcggcacagccgccctgggctgcctggtgaaggactacttccccgaaccggtgaccgtgtcctggaacagcggagccctgaccagcggcgtgcacaccttccccgccgtgctgcagagcagcggcctgtacagcctgagcagcgtggtgaccgtgcccagcagcagcctgggcacccagacctacatctgtaacgtgaaccacaagcccagcaacaccaaggtggacaagaaggtggagcccaagagctgtgacaagacccacacctgccccccctgccctgcccccgagctgctgggaggccccagcgtgttcctgttcccccccaagcctaaggacaccctgatgatcagcagaacccccgaggtgacctgtgtggtggtggatgtgagccacgaggaccctgaggtgaagttcaactggtacgtggacggcgtggaggtgcacaatgccaagaccaagcccagggaggagcagtacaacagcacctaccgggtggtgtccgtgctgaccgtgctgcaccaggattggctgaacggcaaggagtacaagtgtaaggtgtccaacaaggccctgcctgcccctatcgagaaaaccatcagcaaggccaagggccagcccagagagccccaggtgtacaccctgccccctagcagagatgagctgaccaagaaccaggtgtccctgacctgcctggtgaagggcttctaccccagcgacatcgccgtggagtgggagagcaacggccagcccgagaacaactacaagaccaccccccctgtgctggacagcgatggcagcttcttcctgtacagcaagctgaccgtggacaagagcagatggcagcagggcaacgtgttcagctgctccgtgatgcacgaggccctgcacaatcactacacccagaagagcctgagcctgtcccctggcaagaccgtggccgccccctcggaagtgcagctcctggagagcggcggcggcctggtgcagcccggcggcagcctgaggctgagctgcgccgctagcggcttcaccttcaggaacttcggcatgggctgggtcaggcaggcccccggcaagggcctggagtgggtcagctggatcatcagctccggcaccgagacctactacgccgacagcgtgaagggcaggttcaccatcagccgcgacaacagcaagaacaccctgtacctgcagatgaacagcctgagggccgaggacaccgccgtctactactgcgccaagagcctgggcaggttcgactactggggacaggggaccctggtgactgtgagcagc

SEQ ID NO: 251 - DNA, 642 bp, Artificial Sequence
  Humanised
gagatcgtgctgacccagagtccagccaccctcagcctgagccctggggaacgcgccaccctgtcctgccgggcgagtcagaacatctccgactacctgcattggtaccagcagaagcccggccaggcccctcgcctgctgatctactacgcctcccagagcatcagcggaatccccgcccggttctccggaagtgggtccggaaccgactttaccctgaccatcagctctctcgagccagaggacttcgcggtgtactactgccagaacgggcatagtttcccactgaccttcggagggggcacaaaggtggagatcaagcgtacggtggccgcccccagcgtgttcatcttcccccccagcgatgagcagctgaagagcggcaccgccagcgtggtgtgtctgctgaacaacttctacccccgggaggccaaggtgcagtggaaggtggacaatgccctgcagagcggcaacagccaggagagcgtgaccgagcaggacagcaaggactccacctacagcctgagcagcaccctgaccctgagcaaggccgactacgagaagcacaaggtgtacgcctgtgaggtgacccaccagggcctgtccagccccgtgaccaagagcttcaaccggggcgagtgc

SEQ ID NO: 252 - DNA, 1725 bp, Artificial Sequence
  Humanised
caggtgaccctgagggagagcggccccgccctggtgaagcccacccagaccctgaccctgacctgcaccttcagcggctttagcctcagcacctccggcatgggcgtgagctggatcaggcagccacccggcaaaggcctggagtggctggcccacatctactgggacgacgacaagaggtacaaccccagcctgaagagccggctgaccatcagcaaggataccagcaggaaccaggtggtgctgaccatgaccaacatggaccccgtggacaccgctacctactactgcgccaggagggagaccgtcttctactggtacttcgacgtgtggggaaggggcacactagtgaccgtgtccagcgccagcaccaagggccccagcgtgttccccctggcccccagcagcaagagcaccagcggcggcacagccgccctgggctgcctggtgaaggactacttccccgaaccggtgaccgtgtcctggaacagcggagccctgaccagcggcgtgcacaccttccccgccgtgctgcagagcagcggcctgtacagcctgagcagcgtggtgaccgtgcccagcagcagcctgggcacccagacctacatctgtaacgtgaaccacaagcccagcaacaccaaggtggacaagaaggtggagcccaagagctgtgacaagacccacacctgccccccctgccctgcccccgagctgctgggaggccccagcgtgttcctgttcccccccaagcctaaggacaccctgatgatcagcagaacccccgaggtgacctgtgtggtggtggatgtgagccacgaggaccctgaggtgaagttcaactggtacgtggacggcgtggaggtgcacaatgccaagaccaagcccagggaggagcagtacaacagcacctaccgggtggtgtccgtgctgaccgtgctgcaccaggattggctgaacggcaaggagtacaagtgtaaggtgtccaacaaggccctgcctgcccctatcgagaaaaccatcagcaaggccaagggccagcccagagagccccaggtgtacaccctgccccctagcagagatgagctgaccaagaaccaggtgtccctgacctgcctggtgaagggcttctaccccagcgacatcgccgtggagtgggagagcaacggccagcccgagaacaactacaagaccaccccccctgtgctggacagcgatggcagcttcttcctgtacagcaagctgaccgtggacaagagcagatggcagcagggcaacgtgttcagctgctccgtgatgcacgaggccctgcacaatcactacacccagaagagcctgagcctgtcccctggcaagaccgtggccgccccctcgggcgtgcagctcctggagagcggcggaggcctggtccagcccggcggcagcctgaggctgagctgcgccgccagcggcttcgtgttcccctggtatgatatgggctgggtgaggcaggcccccggcaagggcctggagtgggtgtccagcatcgactggaaggggggcaagacctactacgccgacagcgtgaagggcaggttcaccatcagcagggacaacagcaagaacaccctgtacctgcagatgaacagcctgagggccgaggacaccgcagtgtactactgcgccaccgccgaggacgaacccggctacgactactggggccagggcaccctggtgactgtgagcagc

SEQ ID NO: 253 - DNA, 1707 bp, Artificial Sequence
  Humanised
caggtgaccctgagggagagcggccccgccctggtgaagcccacccagaccctgaccctgacctgcaccttcagcggctttagcctcagcacctccggcatgggcgtgagctggatcaggcagccacccggcaaaggcctggagtggctggcccacatctactgggacgacgacaagaggtacaaccccagcctgaagagccggctgaccatcagcaaggataccagcaggaaccaggtggtgctgaccatgaccaacatggaccccgtggacaccgctacctactactgcgccaggagggagaccgtcttctactggtacttcgacgtgtggggaaggggcacactagtgaccgtgtccagcgccagcaccaagggccccagcgtgttccccctggcccccagcagcaagagcaccagcggcggcacagccgccctgggctgcctggtgaaggactacttccccgaaccggtgaccgtgtcctggaacagcggagccctgaccagcggcgtgcacaccttccccgccgtgctgcagagcagcggcctgtacagcctgagcagcgtggtgaccgtgcccagcagcagcctgggcacccagacctacatctgtaacgtgaaccacaagcccagcaacaccaaggtggacaagaaggtggagcccaagagctgtgacaagacccacacctgccccccctgccctgcccccgagctgctgggaggccccagcgtgttcctgttcccccccaagcctaaggacaccctgatgatcagcagaacccccgaggtgacctgtgtggtggtggatgtgagccacgaggaccctgaggtgaagttcaactggtacgtggacggcgtggaggtgcacaatgccaagaccaagcccagggaggagcagtacaacagcacctaccgggtggtgtccgtgctgaccgtgctgcaccaggattggctgaacggcaaggagtacaagtgtaaggtgtccaacaaggccctgcctgcccctatcgagaaaaccatcagcaaggccaagggccagcccagagagccccaggtgtacaccctgccccctagcagagatgagctgaccaagaaccaggtgtccctgacctgcctggtgaagggcttctaccccagcgacatcgccgtggagtgggagagcaacggccagcccgagaacaactacaagaccaccccccctgtgctggacagcgatggcagcttcttcctgtacagcaagctgaccgtggacaagagcagatggcagcagggcaacgtgttcagctgctccgtgatgcacgaggccctgcacaatcactacacccagaagagcctgagcctgtcccctggcaagggcgtgcagctcctggagagcggcggaggcctggtccagcccggcggcagcctgaggctgagctgcgccgccagcggcttcgtgttcccctggtatgatatgggctgggtgaggcaggcccccggcaagggcctggagtgggtgtccagcatcgactggaaggggggcaagacctactacgccgacagcgtgaagggcaggttcaccatcagcagggacaacagcaagaacaccctgtacctgcagatgaacagcctgagggccgaggacaccgcagtgtactactgcgccaccgccgaggacgaacccggctacgactactggggccagggcaccctggtgactgtgagcagc

SEQ ID NO: 254 - DNA, 1725 bp, Artificial Sequence
  Humanised
caggtgaccctgagggagagcggccccgccctggtgaagcccacccagaccctgaccctgacctgcaccttcagcggctttagcctcagcacctccggcatgggcgtgagctggatcaggcagccacccggcaaaggcctggagtggctggcccacatctactgggacgacgacaagaggtacaaccccagcctgaagagccggctgaccatcagcaaggataccagcaggaaccaggtggtgctgaccatgaccaacatggaccccgtggacaccgctacctactactgcgccaggagggagaccgtcttctactggtacttcgacgtgtggggaaggggcacactagtgaccgtgtccagcgccagcaccaagggccccagcgtgttccccctggcccccagcagcaagagcaccagcggcggcacagccgccctgggctgcctggtgaaggactacttccccgaaccggtgaccgtgtcctggaacagcggagccctgaccagcggcgtgcacaccttccccgccgtgctgcagagcagcggcctgtacagcctgagcagcgtggtgaccgtgcccagcagcagcctgggcacccagacctacatctgtaacgtgaaccacaagcccagcaacaccaaggtggacaagaaggtggagcccaagagctgtgacaagacccacacctgccccccctgccctgcccccgagctgctgggaggccccagcgtgttcctgttcccccccaagcctaaggacaccctgatgatcagcagaacccccgaggtgacctgtgtggtggtggatgtgagccacgaggaccctgaggtgaagttcaactggtacgtggacggcgtggaggtgcacaatgccaagaccaagcccagggaggagcagtacaacagcacctaccgggtggtgtccgtgctgaccgtgctgcaccaggattggctgaacggcaaggagtacaagtgtaaggtgtccaacaaggccctgcctgcccctatcgagaaaaccatcagcaaggccaagggccagcccagagagccccaggtgtacaccctgccccctagcagagatgagctgaccaagaaccaggtgtccctgacctgcctggtgaagggcttctaccccagcgacatcgccgtggagtgggagagcaacggccagcccgagaacaactacaagaccaccccccctgtgctggacagcgatggcagcttcttcctgtacagcaagctgaccgtggacaagagcagatggcagcagggcaacgtgttcagctgctccgtgatgcacgaggccctgcacaatcactacacccagaagagcctgagcctgtcccctggcaagaccgtggccgccccctcgggcgtgcagctcctggagagcggcggaggcctggtccagcccggcggcagcctgaggctgagctgcgccgccagcggcttcgtgttcgcctggtatgatatgggctgggtgaggcaggcccccggcaagggcctggagtgggtgtccagcatcgactggcacggggaggtgacctactacgccgacagcgtgaagggcaggttcaccatcagcagggacaacagcaagaacaccctgtacctgcagatgaacagcctgagggccgaggacaccgcagtgtactactgcgccaccgccgaggacgaacccggctacgactactggggccagggcaccctggtgactgtgagcagc

SEQ ID NO: 255 - DNA, 1707 bp, Artificial Sequence
  Humanised
caggtgaccctgagggagagcggccccgccctggtgaagcccacccagaccctgaccctgacctgcaccttcagcggctttagcctcagcacctccggcatgggcgtgagctggatcaggcagccacccggcaaaggcctggagtggctggcccacatctactgggacgacgacaagaggtacaaccccagcctgaagagccggctgaccatcagcaaggataccagcaggaaccaggtggtgctgaccatgaccaacatggaccccgtggacaccgctacctactactgcgccaggagggagaccgtcttctactggtacttcgacgtgtggggaaggggcacactagtgaccgtgtccagcgccagcaccaagggccccagcgtgttccccctggcccccagcagcaagagcaccagcggcggcacagccgccctgggctgcctggtgaaggactacttccccgaaccggtgaccgtgtcctggaacagcggagccctgaccagcggcgtgcacaccttccccgccgtgctgcagagcagcggcctgtacagcctgagcagcgtggtgaccgtgcccagcagcagcctgggcacccagacctacatctgtaacgtgaaccacaagcccagcaacaccaaggtggacaagaaggtggagcccaagagctgtgacaagacccacacctgccccccctgccctgcccccgagctgctgggaggccccagcgtgttcctgttcccccccaagcctaaggacaccctgatgatcagcagaacccccgaggtgacctgtgtggtggtggatgtgagccacgaggaccctgaggtgaagttcaactggtacgtggacggcgtggaggtgcacaatgccaagaccaagcccagggaggagcagtacaacagcacctaccgggtggtgtccgtgctgaccgtgctgcaccaggattggctgaacggcaaggagtacaagtgtaaggtgtccaacaaggccctgcctgcccctatcgagaaaaccatcagcaaggccaagggccagcccagagagccccaggtgtacaccctgccccctagcagagatgagctgaccaagaaccaggtgtccctgacctgcctggtgaagggcttctaccccagcgacatcgccgtggagtgggagagcaacggccagcccgagaacaactacaagaccaccccccctgtgctggacagcgatggcagcttcttcctgtacagcaagctgaccgtggacaagagcagatggcagcagggcaacgtgttcagctgctccgtgatgcacgaggccctgcacaatcactacacccagaagagcctgagcctgtcccctggcaagggcgtgcagctcctggagagcggcggaggcctggtccagcccggcggcagcctgaggctgagctgcgccgccagcggcttcgtgttcgcctggtatgatatgggctgggtgaggcaggcccccggcaagggcctggagtgggtgtccagcatcgactggcacggggaggtgacctactacgccgacagcgtgaagggcaggttcaccatcagcagggacaacagcaagaacaccctgtacctgcagatgaacagcctgagggccgaggacaccgcagtgtactactgcgccaccgccgaggacgaacccggctacgactactggggccagggcaccctggtgactgtgagcagc

SEQ ID NO: 256 - DNA, 1347 bp, Artificial Sequence
  Humanised
caggtgcagctcgtccagtctggggccgaggtgaagaagcccggagcttctgtgaaggtgtcctgcaaggccagcggctataccttcatcgactacgagatccattgggtgaggcaggctcccgggcagggcctggagtggatgggcgccatcgacccagagaccggaggcacggcgtacaaccagaagttcaagggacgggtcaccatgacaaccgataccagcacctccaccgcttacatggagctgcgcagcctgagaagcgacgacaccgcggtgtactactgtacgcgcatcctgctctactactaccccatggattactggggccagggcacactagtcacagtctcctcagcctccaccaagggcccatcggtcttccccctggcaccctcctccaagagcacctctgggggcacagcggccctgggctgcctggtcaaggactacttccccgaaccggtgacggtgtcgtggaactcaggcgccctgaccagcggcgtgcacaccttcccggctgtcctacagtcctcaggactctactccctcagcagcgtggtgaccgtgccctccagcagcttgggcacccagacctacatctgcaacgtgaatcacaagcccagcaacaccaaggtggacaagaaagttgagcccaaatcttgtgacaaaactcacacatgcccaccgtgcccagcacctgaactcctggggggaccgtcagtcttcctcttccccccaaaacccaaggacaccctcatgatctcccggacccctgaggtcacatgcgtggtggtggacgtgagccacgaagaccctgaggtcaagttcaactggtacgtggacggcgtggaggtgcataatgccaagacaaagccgcgggaggagcagtacaacagcacgtaccgtgtggtcagcgtcctcaccgtcctgcaccaggactggctgaatggcaaggagtacaagtgcaaggtctccaacaaagccctcccagcccccatcgagaaaaccatctccaaagccaaagggcagccccgagaaccacaggtgtacaccctgcccccatcccgggatgagctgaccaagaaccaggtcagcctgacctgcctggtcaaaggcttctatcccagcgacatcgccgtggagtgggagagcaatgggcagccggagaacaactacaagaccacgcctcccgtgctggactccgacggctccttcttcctctacagcaagctcaccgtggacaagagcaggtggcagcaggggaacgtcttctcatgctccgtgatgcatgaggctctgcacaaccactacacgcagaagagcctctccctgtctccgggtaaa

SEQ ID NO: 257 - DNA, 2088 bp, Artificial Sequence
  Humanised
caggtgaccctgagggagagcggccccgccctggtgaagcccacacagaccctcactctgacctgcaccgtgagcggcttcagcctgacctcctacagcgtccactgggtgaggcagccccccggcaagggcctggagtggctgggcgtgatctgggcaagcggcggcaccgactacaacagcgccctgatgagcaggctctccatcagcaaggacaccagccggaaccaggtggtgctgaccatgaccaacatggaccccgtggacaccgccacctattactgcgccagggaccctccctctagcctgctgaggctggactactggggcaggggaacactagtgaccgtgtccagcgccagcaccaagggccccagcgtgttccccctggcccccagcagcaagagcaccagcggcggcacagccgccctgggctgcctggtgaaggactacttccccgaaccggtgaccgtgtcctggaacagcggagccctgaccagcggcgtgcacaccttccccgccgtgctgcagagcagcggcctgtacagcctgagcagcgtggtgaccgtgcccagcagcagcctgggcacccagacctacatctgtaacgtgaaccacaagcccagcaacaccaaggtggacaagaaggtggagcccaagagctgtgacaagacccacacctgccccccctgccctgcccccgagctgctgggaggccccagcgtgttcctgttcccccccaagcctaaggacaccctgatgatcagcagaacccccgaggtgacctgtgtggtggtggatgtgagccacgaggaccctgaggtgaagttcaactggtacgtggacggcgtggaggtgcacaatgccaagaccaagcccagggaggagcagtacaacagcacctaccgggtggtgtccgtgctgaccgtgctgcaccaggattggctgaacggcaaggagtacaagtgtaaggtgtccaacaaggccctgcctgcccctatcgagaaaaccatcagcaaggccaagggccagcccagagagccccaggtgtacaccctgccccctagcagagatgagctgaccaagaaccaggtgtccctgacctgcctggtgaagggcttctaccccagcgacatcgccgtggagtgggagagcaacggccagcccgagaacaactacaagaccaccccccctgtgctggacagcgatggcagcttcttcctgtacagcaagctgaccgtggacaagagcagatggcagcagggcaacgtgttcagctgctccgtgatgcacgaggccctgcacaatcactacacccagaagagcctgagcctgtcccctggcaagggcggcggcggatctggcgtgcagctcctggagagcggcggaggcctggtccagcccggcggcagcctgaggctgagctgcgccgccagcggcttcaccttcgcctggtatgatatgggctgggtgaggcaggcccccggcaagggcctggagtgggtgtccagcatcgactggcacggggaggtgacctactacgccgacagcgtgaagggcaggttcaccatcagcagggacaacagcaagaacaccctgtacctgcagatgaacagcctgagggccgaggacaccgcagtgtactactgcgccaccgccgaggacgaacccggctacgactactggggccagggcaccctggtgactgtgagcagcaccgtggccgccccctcgggatccgaagtgcagctcctggagagcggcggcggcctggtgcagcccggcggcagcctgaggctgagctgcgccgctagcggcttcaccttcaggaacttcggcatgggctgggtcaggcaggcccccggcaagggcctggagtgggtcagctggatcatcagctccggcaccgagacctactacgccgacagcgtgaagggcaggttcaccatcagccgcgacaacagcaagaacaccctgtacctgcagatgaacagcctgagggccgaggacaccgccgtctactactgcgccaagagcctgggcaggttcgactactggggacaggggaccctggtgactgtgagcagc

SEQ ID NO: 258 - DNA, 2079 bp, Artificial Sequence
  Humanised
caggtgcagctgcagcagcctggagccgagctggtgaagcccggcgccagcgtgaaaatgtcctgcaaggccagcggctacaccttcaccagctacaacatgcactgggtgaagcagacccccggcaggggcctcgagtggatcggagctatctaccccggcaacggcgacactagctacaaccagaagttcaagggcaaggccaccctgaccgccgacaagagcagcagcaccgcctacatgcagctgagcagcctgaccagcgaggacagcgccgtgtattactgcgccaggagcacctactacggcggcgactggtacttcaacgtctggggcgccggcacactagtgaccgtgtccagcgccagcaccaagggccccagcgtgttccccctggcccccagcagcaagagcaccagcggcggcacagccgccctgggctgcctggtgaaggactacttccccgaaccggtgaccgtgtcctggaacagcggagccctgaccagcggcgtgcacaccttccccgccgtgctgcagagcagcggcctgtacagcctgagcagcgtggtgaccgtgcccagcagcagcctgggcacccagacctacatctgtaacgtgaaccacaagcccagcaacaccaaggtggacaagaaggtggagcccaagagctgtgacaagacccacacctgccccccctgccctgcccccgagctgctgggaggccccagcgtgttcctgttcccccccaagcctaaggacaccctgatgatcagcagaacccccgaggtgacctgtgtggtggtggatgtgagccacgaggaccctgaggtgaagttcaactggtacgtggacggcgtggaggtgcacaatgccaagaccaagcccagggaggagcagtacaacagcacctaccgggtggtgtccgtgctgaccgtgctgcaccaggattggctgaacggcaaggagtacaagtgtaaggtgtccaacaaggccctgcctgcccctatcgagaaaaccatcagcaaggccaagggccagcccagagagccccaggtgtacaccctgccccctagcagagatgagctgaccaagaaccaggtgtccctgacctgcctggtgaagggcttctaccccagcgacatcgccgtggagtgggagagcaacggccagcccgagaacaactacaagaccaccccccctgtgctggacagcgatggcagcttcttcctgtacagcaagctgaccgtggacaagagcagatggcagcagggcaacgtgttcagctgctccgtgatgcacgaggccctgcacaatcactacacccagaagagcctgagcctgtcccctggcaagaccgtggccgccccctcgggatctgacatccagatgacccagagccccagcagcctgagcgccagcgtgggcgacagggtgaccattacctgcagggccagcaggcccatcagcgactggctgcactggtaccaacagaagcccggcaaggctcccaagctgctgatcgcctgggccagcagcctgcagggaggcgtgcccagcaggtttagcggcagcggcagcggcaccgacttcaccctcaccatctcttccctgcagcccgaggacttcgccacctactactgcctgcaggagggctgggggccccctactttcggccagggcaccaaggtggagatcaagaggaccgtggccgccccctcgggatccggcgtgcagctcctggagagcggcggaggcctggtccagcccggcggcagcctgaggctgagctgcgccgccagcggcttcaccttcgcctggtatgatatgggctgggtgaggcaggcccccggcaagggcctggagtgggtgtccagcatcgactggcacggggaggtgacctactacgccgacagcgtgaagggcaggttcaccatcagcagggacaacagcaagaacaccctgtacctgcagatgaacagcctgagggccgaggacaccgcagtgtactactgcgccaccgccgaggacgaacccggctacgactactggggccagggcaccctggtgactgtgagcagc

SEQ ID NO: 259 - DNA, 2103 bp, Artificial Sequence
  Humanised
caggtgcagctgcagcagcctggagccgagctggtgaagcccggcgccagcgtgaaaatgtcctgcaaggccagcggctacaccttcaccagctacaacatgcactgggtgaagcagacccccggcaggggcctcgagtggatcggagctatctaccccggcaacggcgacactagctacaaccagaagttcaagggcaaggccaccctgaccgccgacaagagcagcagcaccgcctacatgcagctgagcagcctgaccagcgaggacagcgccgtgtattactgcgccaggagcacctactacggcggcgactggtacttcaacgtctggggcgccggcacactagtgaccgtgtccagcgccagcaccaagggccccagcgtgttccccctggcccccagcagcaagagcaccagcggcggcacagccgccctgggctgcctggtgaaggactacttccccgaaccggtgaccgtgtcctggaacagcggagccctgaccagcggcgtgcacaccttccccgccgtgctgcagagcagcggcctgtacagcctgagcagcgtggtgaccgtgcccagcagcagcctgggcacccagacctacatctgtaacgtgaaccacaagcccagcaacaccaaggtggacaagaaggtggagcccaagagctgtgacaagacccacacctgccccccctgccctgcccccgagctgctgggaggccccagcgtgttcctgttcccccccaagcctaaggacaccctgatgatcagcagaacccccgaggtgacctgtgtggtggtggatgtgagccacgaggaccctgaggtgaagttcaactggtacgtggacggcgtggaggtgcacaatgccaagaccaagcccagggaggagcagtacaacagcacctaccgggtggtgtccgtgctgaccgtgctgcaccaggattggctgaacggcaaggagtacaagtgtaaggtgtccaacaaggccctgcctgcccctatcgagaaaaccatcagcaaggccaagggccagcccagagagccccaggtgtacaccctgccccctagcagagatgagctgaccaagaaccaggtgtccctgacctgcctggtgaagggcttctaccccagcgacatcgccgtggagtgggagagcaacggccagcccgagaacaactacaagaccaccccccctgtgctggacagcgatggcagcttcttcctgtacagcaagctgaccgtggacaagagcagatggcagcagggcaacgtgttcagctgctccgtgatgcacgaggccctgcacaatcactacacccagaagagcctgagcctgtcccctggcaagaccgtggccgccccctcgggatctgaagtgcagctcctggagagcggcggcggcctggtgcagcccggcggcagcctgaggctgagctgcgccgctagcggcttcaccttcaggaacttcggcatgggctgggtcaggcaggcccccggcaagggcctggagtgggtcagctggatcatcagctccggcaccgagacctactacgccgacagcgtgaagggcaggttcaccatcagccgcgacaacagcaagaacaccctgtacctgcagatgaacagcctgagggccgaggacaccgccgtctactactgcgccaagagcctgggcaggttcgactactggggacaggggaccctggtgactgtgagcagcaccgtggccgccccctcgggatccggcgtgcagctcctggagagcggcggaggcctggtccagcccggcggcagcctgaggctgagctgcgccgccagcggcttcaccttcgcctggtatgatatgggctgggtgaggcaggcccccggcaagggcctggagtgggtgtccagcatcgactggcacggggaggtgacctactacgccgacagcgtgaagggcaggttcaccatcagcagggacaacagcaagaacaccctgtacctgcagatgaacagcctgagggccgaggacaccgcagtgtactactgcgccaccgccgaggacgaacccggctacgactactggggccagggcaccctggtgactgtgagcagc

SEQ ID NO: 260 - DNA, 1701 bp, Artificial Sequence
  Humanised
gaggtgcagctggtggaaagcggcggcggcctggtgcagcccggcggctccctgaggctgagctgcgccgctagcggctacaccttcaccagctactggctccactgggtcaggcaggccccaggcaagggactggagtgggtgggcatgatcgaccccagcaacagcgacaccaggttcaaccccaacttcaaggacaggttcaccatcagcgccgacactagcaagaacaccgcctacctgcagatgaacagcctgagggccgaggacaccgccgtgtattactgcgccacctacaggagctacgtcacccccctggattactggggccagggcacactagtgaccgtgtccagcgccagcaccaagggccccagcgtgttccccctggcccccagcagcaagagcaccagcggcggcacagccgccctgggctgcctggtgaaggactacttccccgaaccggtgaccgtgtcctggaacagcggagccctgaccagcggcgtgcacaccttccccgccgtgctgcagagcagcggcctgtacagcctgagcagcgtggtgaccgtgcccagcagcagcctgggcacccagacctacatctgtaacgtgaaccacaagcccagcaacaccaaggtggacaagaaggtggagcccaagagctgtgacaagacccacacctgccccccctgccctgcccccgagctgctgggaggccccagcgtgttcctgttcccccccaagcctaaggacaccctgatgatcagcagaacccccgaggtgacctgtgtggtggtggatgtgagccacgaggaccctgaggtgaagttcaactggtacgtggacggcgtggaggtgcacaatgccaagaccaagcccagggaggagcagtacaacagcacctaccgggtggtgtccgtgctgaccgtgctgcaccaggattggctgaacggcaaggagtacaagtgtaaggtgtccaacaaggccctgcctgcccctatcgagaaaaccatcagcaaggccaagggccagcccagagagccccaggtgtacaccctgccccctagcagagatgagctgaccaagaaccaggtgtccctgagctgcgccgtgaagggcttctaccccagcgacatcgccgtggagtgggagagcaacggccagcccgagaacaactacaagaccaccccccctgtgctggacagcgatggcagcttcttcctggtgagcaagctgaccgtggacaagagcagatggcagcagggcaacgtgttcagctgctccgtgatgcacgaggccctgcacaatcactacacccagaagagcctgagcctgtcccctggcaagggatccgaggtgcagctcctggtcagcggcggcggcctggtccagcccggaggctcactgaggctgagctgcgccgctagcggcttcaccttcaaggcctaccccatgatgtgggtcaggcaggcccccggcaaaggcctggagtgggtgtctgagatcagccccagcggcagctacacctactacgccgacagcgtgaagggcaggttcaccatcagcagggacaacagcaagaacaccctgtacctgcagatgaactctctgagggccgaggacaccgccgtgtactactgcgccaaggaccccaggaagctggactattggggccagggcactctggtgaccgtgagcagc

SEQ ID NO: 261 - DNA, 1020 bp, Artificial Sequence
  Humanised
tgccccccctgccctgcccccgagctgctgggaggccccagcgtgttcctgttcccccccaagcctaaggacaccctgatgatcagcagaacccccgaggtgacctgtgtggtggtggatgtgagccacgaggaccctgaggtgaagttcaactggtacgtggacggcgtggaggtgcacaatgccaagaccaagcccagggaggagcagtacaacagcacctaccgggtggtgtccgtgctgaccgtgctgcaccaggattggctgaacggcaaggagtacaagtgtaaggtgtccaacaaggccctgcctgcccctatcgagaaaaccatcagcaaggccaagggccagcccagagagccccaggtgtacaccctgccccctagcagagatgagctgaccaagaaccaggtgtccctgtggtgcctggtgaagggcttctaccccagcgacatcgccgtggagtgggagagcaacggccagcccgagaacaactacaagaccaccccccctgtgctggacagcgatggcagcttcttcctgtacagcaagctgaccgtggacaagagcagatggcagcagggcaacgtgttcagctgctccgtgatgcacgaggccctgcacaatcactacacccagaagagcctgagcctgtcccctggcaagggatccgaggtgcagctcctggtcagcggcggcggcctggtccagcccggaggctcactgaggctgagctgcgccgctagcggcttcaccttcaaggcctaccccatgatgtgggtcaggcaggcccccggcaaaggcctggagtgggtgtctgagatcagccccagcggcagctacacctactacgccgacagcgtgaagggcaggttcaccatcagcagggacaacagcaagaacaccctgtacctgcagatgaactctctgagggccgaggacaccgccgtgtactactgcgccaaggaccccaggaagctggactattggggccagggcactctggtgaccgtgagcagc

SEQ ID NO: 262 - DNA, 660 bp, Artificial Sequence
  Humanised
gacatccagatgacccagagccccagcagcctgagcgcctcagtgggagacagggtgaccatcacctgcaagagcagccagagcctcctgtacaccagcagccagaagaactacctggcctggtaccagcagaaacccggcaaggcccccaagctgctgatctactgggctagcaccagggagtcaggcgtgcccagcaggttcagcggcagcggcagcggcaccgacttcactctgaccatcagcagcctgcagcccgaggacttcgccacctactactgccagcagtactacgcctatccctggaccttcggccagggcaccaaggtggagatcaagcgtacggtggccgcccccagcgtgttcatcttcccccccagcgatgagcagctgaagagcggcaccgccagcgtggtgtgtctgctgaacaacttctacccccgggaggccaaggtgcagtggaaggtggacaatgccctgcagagcggcaacagccaggagagcgtgaccgagcaggacagcaaggactccacctacagcctgagcagcaccctgaccctgagcaaggccgactacgagaagcacaaggtgtacgcctgtgaggtgacccaccagggcctgtccagccccgtgaccaagagcttcaaccggggcgagtgc

SEQ ID NO: 263 - DNA, 1656 bp, Artificial Sequence
  Humanised
gaggtgcagctggtggaaagcggcggcggcctggtgcagcccggcggctccctgaggctgagctgcgccgctagcggctacaccttcaccagctactggctccactgggtcaggcaggccccaggcaagggactggagtgggtgggcatgatcgaccccagcaacagcgacaccaggttcaaccccaacttcaaggacaggttcaccatcagcgccgacactagcaagaacaccgcctacctgcagatgaacagcctgagggccgaggacaccgccgtgtattactgcgccacctacaggagctacgtcacccccctggattactggggccagggcacactagtcaccgtgagcagcgccagcaccaagggccccagcgtgttccccctggccccctgcagcagaagcaccagcgagagcacagccgccctgggctgcctggtgaaggactacttccccgagcccgtgaccgtgagctggaacagcggagccctgaccagcggcgtgcacaccttccccgccgtgctgcagagcagcggcctgtacagcctgagcagcgtggtgaccgtgcccagcagcagcctgggcaccaagacctacacctgcaacgtggaccacaagcccagcaacaccaaggtggacaagcgggtggcccccgagttcctgggcggaccctccgtgttcctgttcccccccaagcccaaggacaccctgatgatcagccggacccccgaggtgacctgcgtggtggtggacgtgagccaggaagatcccgaggtccagttcaattggtacgtggacggcgtggaggtgcacaacgccaagaccaagccccgggaggaacagttcaacagcacctaccgggtggtgtccgtgctgaccgtgctgcaccaggactggctgaacggcaaagaatacaagtgcaaggtgtccaacaagggcctgcccagctccatcgagaaaaccatcagcaaggccaagggccagcctcgggagccccaggtgtacaccctgcccccatcccaggaagagatgaccaagaaccaggtgtccctgacctgtctggtgaagggcttctaccccagcgacatcgccgtggagtgggagagcaacggccagcccgagaacaactacaagaccaccccccctgtgctggacagcgacggcagcttcttcctgtacagcaggctgaccgtggacaagagccggtggcaggaaggcaacgtctttagctgcagcgtgatgcacgaggccctgcacaaccactacacccagaagagcctgagcctgtccctgggcaagggatccgaggtgcagctcctggtcagcggcggcggcctggtccagcccggaggctcactgaggctgagctgcgccgctagcggcttcaccttcaaggcctaccccatgatgtgggtcaggcaggcccccggcaaaggcctggagtgggtgtctgagatcagccccagcggcagctacacctactacgccgacagcgtgaagggcaggttcaccatcagcagggacaacagcaagaacaccctgtacctgcagatgaactctctgagggccgaggacaccgccgtgtactactgcgccaaggaccccaggaagctggactattggggccagggcactctggtgaccgtgagcagc

SEQ ID NO: 264 - DNA, 1347 bp, Artificial Sequence
  Humanised
gaggtgcagctggtggaaagcggcggcggcctggtgcagcccggcggctccctgaggctgagctgcgccgctagcggctacaccttcaccagctactggctccactgggtcaggcaggccccaggcaagggactggagtgggtgggcatgatcgaccccagcaacagcgacaccaggttcaaccccaacttcaaggacaggttcaccatcagcgccgacactagcaagaacaccgcctacctgcagatgaacagcctgagggccgaggacaccgccgtgtattactgcgccacctacaggagctacgtcacccccctggattactggggccagggcacactagtgaccgtgtccagcgccagcaccaagggccccagcgtgttccccctggcccccagcagcaagagcaccagcggcggcacagccgccctgggctgcctggtgaaggactacttccccgaaccggtgaccgtgtcctggaacagcggagccctgaccagcggcgtgcacaccttccccgccgtgctgcagagcagcggcctgtacagcctgagcagcgtggtgaccgtgcccagcagcagcctgggcacccagacctacatctgtaacgtgaaccacaagcccagcaacaccaaggtggacaagaaggtggagcccaagagctgtgacaagacccacacctgccccccctgccctgcccccgagctgctgggaggccccagcgtgttcctgttcccccccaagcctaaggacaccctgatgatcagcagaacccccgaggtgacctgtgtggtggtggatgtgagccacgaggaccctgaggtgaagttcaactggtacgtggacggcgtggaggtgcacaatgccaagaccaagcccagggaggagcagtacaacagcacctaccgggtggtgtccgtgctgaccgtgctgcaccaggattggctgaacggcaaggagtacaagtgtaaggtgtccaacaaggccctgcctgcccctatcgagaaaaccatcagcaaggccaagggccagcccagagagccccaggtgtacaccctgccccctagcagagatgagctgaccaagaaccaggtgtccctgagctgcgccgtgaagggcttctaccccagcgacatcgccgtggagtgggagagcaacggccagcccgagaacaactacaagaccaccccccctgtgctggacagcgatggcagcttcttcctggtgagcaagctgaccgtggacaagagcagatggcagcagggcaacgtgttcagctgctccgtgatgcacgaggccctgcacaatcactacacccagaagagcctgagcctgtcccctggcaag

SEQ ID NO: 265 - DNA, 666 bp, Artificial Sequence
  Humanised
tgccccccctgccctgcccccgagctgctgggaggccccagcgtgttcctgttcccccccaagcctaaggacaccctgatgatcagcagaacccccgaggtgacctgtgtggtggtggatgtgagccacgaggaccctgaggtgaagttcaactggtacgtggacggcgtggaggtgcacaatgccaagaccaagcccagggaggagcagtacaacagcacctaccgggtggtgtccgtgctgaccgtgctgcaccaggattggctgaacggcaaggagtacaagtgtaaggtgtccaacaaggccctgcctgcccctatcgagaaaaccatcagcaaggccaagggccagcccagagagccccaggtgtacaccctgccccctagcagagatgagctgaccaagaaccaggtgtccctgtggtgcctggtgaagggcttctaccccagcgacatcgccgtggagtgggagagcaacggccagcccgagaacaactacaagaccaccccccctgtgctggacagcgatggcagcttcttcctgtacagcaagctgaccgtggacaagagcagatggcagcagggcaacgtgttcagctgctccgtgatgcacgaggccctgcacaatcactacacccagaagagcctgagcctgtcccctggcaag

SEQ ID NO: 266 - DNA, 1302 bp, Artificial Sequence
  Humanised
gaggtgcagctggtggaaagcggcggcggcctggtgcagcccggcggctccctgaggctgagctgcgccgctagcggctacaccttcaccagctactggctccactgggtcaggcaggccccaggcaagggactggagtgggtgggcatgatcgaccccagcaacagcgacaccaggttcaaccccaacttcaaggacaggttcaccatcagcgccgacactagcaagaacaccgcctacctgcagatgaacagcctgagggccgaggacaccgccgtgtattactgcgccacctacaggagctacgtcacccccctggattactggggccagggcacactagtcaccgtgagcagcgccagcaccaagggccccagcgtgttccccctggccccctgcagcagaagcaccagcgagagcacagccgccctgggctgcctggtgaaggactacttccccgagcccgtgaccgtgagctggaacagcggagccctgaccagcggcgtgcacaccttccccgccgtgctgcagagcagcggcctgtacagcctgagcagcgtggtgaccgtgcccagcagcagcctgggcaccaagacctacacctgcaacgtggaccacaagcccagcaacaccaaggtggacaagcgggtggcccccgagttcctgggcggaccctccgtgttcctgttcccccccaagcccaaggacaccctgatgatcagccggacccccgaggtgacctgcgtggtggtggacgtgagccaggaagatcccgaggtccagttcaattggtacgtggacggcgtggaggtgcacaacgccaagaccaagccccgggaggaacagttcaacagcacctaccgggtggtgtccgtgctgaccgtgctgcaccaggactggctgaacggcaaagaatacaagtgcaaggtgtccaacaagggcctgcccagctccatcgagaaaaccatcagcaaggccaagggccagcctcgggagccccaggtgtacaccctgcccccatcccaggaagagatgaccaagaaccaggtgtccctgacctgtctggtgaagggcttctaccccagcgacatcgccgtggagtgggagagcaacggccagcccgagaacaactacaagaccaccccccctgtgctggacagcgacggcagcttcttcctgtacagcaggctgaccgtggacaagagccggtggcaggaaggcaacgtctttagctgcagcgtgatgcacgaggccctgcacaaccactacacccagaagagcctgagcctgtccctgggcaag

SEQ ID NO: 267 - DNA, 1701 bp, Artificial Sequence
  Humanised
caggtgaccctgagggagagcggccccgccctggtgaagcccacccagaccctgaccctgacctgcaccttcagcggctttagcctcagcacctccggcatgggcgtgagctggatcaggcagccacccggcaaaggcctggagtggctggcccacatctactgggacgacgacaagaggtacaaccccagcctgaagagccggctgaccatcagcaaggataccagcaggaaccaggtggtgctgaccatgaccaacatggaccccgtggacaccgctacctactactgcgccaggagggagaccgtcttctactggtacttcgacgtgtggggaaggggcacactagtcaccgtgagcagcgccagcaccaagggccccagcgtgttccccctggccccctgcagcagaagcaccagcgagagcacagccgccctgggctgcctggtgaaggactacttccccgagcccgtgaccgtgagctggaacagcggagccctgaccagcggcgtgcacaccttccccgccgtgctgcagagcagcggcctgtacagcctgagcagcgtggtgaccgtgcccagcagcaacttcggcacccagacctacacctgcaacgtggaccacaagcccagcaacaccaaggtggacaagaccgtggagcggaagtgctgcgtggagtgccccccctgccctgcccctcctgtggccggaccctccgtgttcctgttcccccccaagcccaaggacaccctgatgatcagccggacccccgaggtgacctgcgtggtggtggacgtgagccacgaggaccccgaggtgcagttcaattggtacgtggacggcgtggaggtgcacaacgccaagaccaagccccgggaggaacagttcaacagcaccttccgggtggtgtccgtgctgaccgtggtgcaccaggactggctgaacggcaaagaatacaagtgcaaggtgtccaacaagggcctgcctgcccccatcgagaaaaccatcagcaagaccaagggccagcccagggaaccccaggtgtacaccctgccccccagccgggaggaaatgaccaagaaccaggtgtccctgacctgtctggtgaagggcttctaccccagcgacatcgccgtggagtgggagagcaacggccagcccgagaacaactacaagaccaccccccccatgctggacagcgacggcagcttcttcctgtacagcaagctgacagtggacaagagccggtggcagcagggcaacgtgttcagctgcagcgtgatgcacgaggccctgcacaaccactacacccagaagagcctgagcctgtcccccggcaagggatccggcgtgcagctcctggagagcggcggaggcctggtccagcccggcggcagcctgaggctgagctgcgccgccagcggcttcaccttcgcctggtatgatatgggctgggtgaggcaggcccccggcaagggcctggagtgggtgtccagcatcgactggcacggggaggtgacctactacgccgacagcgtgaagggcaggttcaccatcagcagggacaacagcaagaacaccctgtacctgcagatgaacagcctgagggccgaggacaccgcagtgtactactgcgccaccgccgaggacgaacccggctacgactactggggccagggcaccctggtgactgtgagcagc

SEQ ID NO: 268 - DNA, 1704 bp, Artificial Sequence
  Humanised
caggtgaccctgagggagagcggccccgccctggtgaagcccacccagaccctgaccctgacctgcaccttcagcggctttagcctcagcacctccggcatgggcgtgagctggatcaggcagccacccggcaaaggcctggagtggctggcccacatctactgggacgacgacaagaggtacaaccccagcctgaagagccggctgaccatcagcaaggataccagcaggaaccaggtggtgctgaccatgaccaacatggaccccgtggacaccgctacctactactgcgccaggagggagaccgtcttctactggtacttcgacgtgtggggaaggggcacactagtcaccgtgagcagcgccagcaccaagggccccagcgtgttccccctggccccctgcagcagaagcaccagcgagagcacagccgccctgggctgcctggtgaaggactacttccccgagcccgtgaccgtgagctggaacagcggagccctgaccagcggcgtgcacaccttccccgccgtgctgcagagcagcggcctgtacagcctgagcagcgtggtgaccgtgcccagcagcagcctgggcaccaagacctacacctgcaacgtggaccacaagcccagcaacaccaaggtggacaagcgggtggagagcaagtacggccctccctgccccagctgccctgcccccgagttcctgggcggaccctccgtgttcctgttcccccccaagcccaaggacaccctgatgatcagccggacccccgaggtgacctgcgtggtggtggacgtgagccaggaagatcccgaggtccagttcaattggtacgtggacggcgtggaggtgcacaacgccaagaccaagccccgggaggaacagttcaacagcacctaccgggtggtgtccgtgctgaccgtgctgcaccaggactggctgaacggcaaagaatacaagtgcaaggtgtccaacaagggcctgcccagctccatcgagaaaaccatcagcaaggccaagggccagcctcgggagccccaggtgtacaccctgcccccatcccaggaagagatgaccaagaaccaggtgtccctgacctgtctggtgaagggcttctaccccagcgacatcgccgtggagtgggagagcaacggccagcccgagaacaactacaagaccaccccccctgtgctggacagcgacggcagcttcttcctgtacagcaggctgaccgtggacaagagccggtggcaggaaggcaacgtctttagctgcagcgtgatgcacgaggccctgcacaaccactacacccagaagagcctgagcctgtccctgggcaagggatccggcgtgcagctcctggagagcggcggaggcctggtccagcccggcggcagcctgaggctgagctgcgccgccagcggcttcaccttcgcctggtatgatatgggctgggtgaggcaggcccccggcaagggcctggagtgggtgtccagcatcgactggcacggggaggtgacctactacgccgacagcgtgaagggcaggttcaccatcagcagggacaacagcaagaacaccctgtacctgcagatgaacagcctgagggccgaggacaccgcagtgtactactgcgccaccgccgaggacgaacccggctacgactactggggccagggcaccctggtgactgtgagcagc

SEQ ID NO: 269 - DNA, 1704 bp, Artificial Sequence
  Humanised
caggtgaccctgagggagagcggccccgccctggtgaagcccacccagaccctgaccctgacctgcaccttcagcggctttagcctcagcacctccggcatgggcgtgagctggatcaggcagccacccggcaaaggcctggagtggctggcccacatctactgggacgacgacaagaggtacaaccccagcctgaagagccggctgaccatcagcaaggataccagcaggaaccaggtggtgctgaccatgaccaacatggaccccgtggacaccgctacctactactgcgccaggagggagaccgtcttctactggtacttcgacgtgtggggaaggggcacactagtcaccgtgagcagcgccagcaccaagggccccagcgtgttccccctggccccctgcagcagaagcaccagcgagagcacagccgccctgggctgcctggtgaaggactacttccccgagcccgtgaccgtgagctggaacagcggagccctgaccagcggcgtgcacaccttccccgccgtgctgcagagcagcggcctgtacagcctgagcagcgtggtgaccgtgcccagcagcagcctgggcaccaagacctacacctgcaacgtggaccacaagcccagcaacaccaaggtggacaagcgggtggagagcaagtacggccctccctgccccccctgccctgcccccgagttcgagggcggaccctccgtgttcctgttcccccccaagcccaaggacaccctgatgatcagccggacccccgaggtgacctgcgtggtggtggacgtgagccaggaagatcccgaggtccagttcaattggtacgtggacggcgtggaggtgcacaacgccaagaccaagccccgggaggaacagttcaacagcacctaccgggtggtgtccgtgctgaccgtgctgcaccaggactggctgaacggcaaagaatacaagtgcaaggtgtccaacaagggcctgcccagctccatcgagaaaaccatcagcaaggccaagggccagcctcgggagccccaggtgtacaccctgcccccatcccaggaagagatgaccaagaaccaggtgtccctgacctgtctggtgaagggcttctaccccagcgacatcgccgtggagtgggagagcaacggccagcccgagaacaactacaagaccaccccccctgtgctggacagcgacggcagcttcttcctgtacagcaggctgaccgtggacaagagccggtggcaggaaggcaacgtctttagctgcagcgtgatgcacgaggccctgcacaaccactacacccagaagagcctgagcctgtccctgggcaagggatccggcgtgcagctcctggagagcggcggaggcctggtccagcccggcggcagcctgaggctgagctgcgccgccagcggcttcaccttcgcctggtatgatatgggctgggtgaggcaggcccccggcaagggcctggagtgggtgtccagcatcgactggcacggggaggtgacctactacgccgacagcgtgaagggcaggttcaccatcagcagggacaacagcaagaacaccctgtacctgcagatgaacagcctgagggccgaggacaccgcagtgtactactgcgccaccgccgaggacgaacccggctacgactactggggccagggcaccctggtgactgtgagcagc

SEQ ID NO: 270 - DNA, 1641 bp, Artificial Sequence
  Humanised
caggtgaccctgagggagagcggccccgccctggtgaagcccacccagaccctgaccctgacctgcaccttcagcggctttagcctcagcacctccggcatgggcgtgagctggatcaggcagccacccggcaaaggcctggagtggctggcccacatctactgggacgacgacaagaggtacaaccccagcctgaagagccggctgaccatcagcaaggataccagcaggaaccaggtggtgctgaccatgaccaacatggaccccgtggacaccgctacctactactgcgccaggagggagaccgtcttctactggtacttcgacgtgtggggaaggggcacactagtgaccgtgtccagcgccagcaccaagggccccagcgtgttccccctggcccccagcagcaagagcaccagcggcggcacagccgccctgggctgcctggtgaaggactacttccccgaaccggtgaccgtgtcctggaacagcggagccctgaccagcggcgtgcacaccttccccgccgtgctgcagagcagcggcctgtacagcctgagcagcgtggtgaccgtgcccagcagcagcctgggcacccagacctacatctgtaacgtgaaccacaagcccagcaacaccaaggtggacaagaaggtggagcccaagagctgtgacaagacccacacctgccccccctgccctgcccccgagctgctgggaggccccagcgtgttcctgttcccccccaagcctaaggacaccctgatgatcagcagaacccccgaggtgacctgtgtggtggtggatgtgagccacgaggaccctgaggtgaagttcaactggtacgtggacggcgtggaggtgcacaatgccaagaccaagcccagggaggagcagtacaacagcacctaccgggtggtgtccgtgctgaccgtgctgcaccaggattggctgaacggcaaggagtacaagtgtaaggtgtccaacaaggccctgcctgcccctatcgagaaaaccatcagcaaggccaagggccagcccagagagccccaggtgtacaccctgccccctagcagagatgagctgaccaagaaccaggtgtccctgacctgcctggtgaagggcttctaccccagcgacatcgccgtggagtgggagagcaacggccagcccgagaacaactacaagaccaccccccctgtgctggacagcgatggcagcttcttcctgtacagcaagctgaccgtggacaagagcagatggcagcagggcaacgtgttcagctgctccgtgatgcacgaggccctgcacaatcactacacccagaagagcctgagcctgtcccctggcaagggatccgtgagcgacgtgccaagggacctcgaggtggtggcagccactcccacctctctgctgatcagctgggacacacacaacgcctacaacggctactacaggatcacctacggagagaccggcggcaatagccccgtgagggagttcaccgtgccccaccccgaggtgaccgccaccattagcggcctgaagcccggcgtggacgataccatcaccgtctacgccgtgaccaaccaccacatgcccctgaggatcttcggccccatcagcatcaaccataggacc
